(19) United States
(12) Patent Application Publication
(10) Pub. No.: US 2011/0039775 A1
(43) Pub. Date: Feb. 17, 2011

(54) THYROID STIMULATING HORMONE FUSION PROTEINS

(76) Inventors: Peter Artymiuk, Sheffield (GB); Richard Ross, Sheffield (GB)

Correspondence Address: KLARQUIST SPARKMAN, LLP, 121 SW SALMON STREET, SUITE 1600, PORTLAND, OR, 97204, US

(21) Appl. No.: 12/933,386

(22) PCT Filed: Mar. 19, 2009
(86) PCT No.: PCT/GB2009/000742

§ 371 Date: Oct. 28, 2010

Related U.S. Application Data
(60) Provisional application No. 61/038,540, filed on Mar. 21, 2008.

(30) Foreign Application Priority Data
May 9, 2008 (GB) 0808402.2

(51) Int. Cl. A61K 38/24; C07K 14/59; C07H 21/00; C12N 15/63; C12N 5/10; A61P 5/14; A61P 35/00; A61P 19/10

(52) U.S. Cl. 514/9.7; 530/399; 536/23.4; 435/320.1; 435/325

(57) ABSTRACT

We disclose TSH fusion proteins comprising TSHα and/or TSH β and methods to treat diseases that would benefit from administration of TSH agonists and antagonists.

[0001] The invention relates to thyroid stimulating hormone [TSH] fusion proteins; dimers comprising said fusion protein; and methods to treat diseases that would benefit from administration of said fusion proteins.

[0002] There are many examples of bioactive polypeptides that function to regulate biological processes. For example thyrotrophin releasing hormone (TRH) from the hypothalamus regulates the release of thyroid stimulating hormone (TSH) from the pituitary which stimulates the release of thyroid hormones from the thyroid gland. TSH binds to the TSH receptor a GPCR resulting in increased uptake of iodine into the thyroid, thyroid growth and release of the thyroid hormones, thyroxine and trioiodothyronine. Deficiency in TSH due to hypopituitarism results in hypothyroidism and excess TSH from a TSH secreting pituitary tumour in hyperthyroidism. Hyperthyroidism or thyrotoxicosis may be caused by autoantibodies that stimulate the TSH receptor, Graves's disease. Another common cause of thyrotoxicosis is a multinodular goitre where the gland come autonomous, secretes excess thyroid hormones and consequently suppresses TSH levels. This also occurs in patients who have thyrotoxicosis due to a single toxic thyroid nodule. Thyrotoxicosis due to excess TSH secretion from pituitary tumours, a TSHoma, is rare. These tumours are difficult to treat and patients may have uncontrolled thyrotoxicosis. Hypothyroidism is most commonly caused by failure of the thyroid, primary hypothyroidism, where TSH levels are high. Less commonly hypothyrodism is related to TSH deficiency from the pituitary, secondary hypothyroidism.

[0003] Thyroid cancers occur at all ages. The primary treatment is surgery with complete removal of the thyroid gland, however almost invariably a small thyroid remnant is left after surgery. The usual practice is to ablate the thyroid remnant with radioactive iodine. Normal thyroid tissue and some thyroid cancers avidly take up radioactive iodine which then results in ablation of the tissue. Following ablation of the thyroid remnant then radioactive iodine can be used to screen patients for recurrence of their thyroid cancer. If patients have a thyroid cancer that takes up radioactive iodine then radioactive iodine can be used as therapy to treat the cancer.

[0004] Iodine uptake by the thyroid as well as other isotopes such as technetium is dependant on the presence TSH activity to stimulate their uptake into the thyroid. There is therefore a problem in stimulating uptake of isotopes of iodine or related molecules in situations where TSH levels are suppressed. This occurs in patients who are thyrotoxic for example with a multinodular goitre and those receiving thyroid hormone replacement after surgical treatment for thyroid cancer. It is generally considered that TSH may stimulate thyroid cancer regrowth thus patients who have undergone thyroidectomy for a thyroid cancer receive suppressive doses of thyroid hormone either T4 or T3. On these suppressive doses TSH is suppressed and it is not possible to undertake iodine or technetium or any isotope scanning of the thyroid. Before the availability of recombinant TSH patients would have to stop thyroid replacement to allow TSH levels to rise and as a consequence became frankly and symptomatically hypothyroid prior to scanning. This was unpleasant, unpredictable, and time consuming. Now with recombinant TSH patients can remain on thyroid hormone treatment during iodine scanning as they will be treated with recombinant TSH which will increase uptake of iodine and related molecules into the thyroid. This approach of recombinant TSH treatment can be used to increase uptake of iodine or related molecules into thyroid remnants, thyroid cancers, and multinodular goitres or any tumour or cancer that takes up iodine or related compounds. Current recombinant TSH has a relatively short half-life and therefore at least two doses are required on separate days prior to iodine treatment. A long acting TSH would be an advantage if it increased radioactive iodine isotopes or other isotopes uptake into the thyroid, a thyroid cancer or other cancer.

[0005] TSH agonists can be used to increase iodine, radioactive iodine, technetium and other isotopes of molecules uptake into the thyroid. This is of value in any situation where TSH levels are suppressed or even not elevated such as patients taking thyroid hormone, T4 and/or T3 or where patients have thyrotoxicosis due to a single toxic thyroid nodule, or multinodular goitre. In Graves disease patients generally have TSH stimulating antibodies however it maybe possible that a temporary treatment with TSH at the time of radioactive iodine therapy may selectively enhance iodine uptake into the thyroid and improve efficacy of treatment.

[0006] Another use for a TSH agonists would be in the treatment of secondary hypothyroidism where TSH levels are low. These patients usually take daily thyroxine therapy. A TSH agonist could potentially provide therapy if it could maintain thyroid hormone levels in the normal range. An advantage of this therapy could be maintenance of more physiological levels of thyroid hormones as currently most patients only receive thyroxine (T4) which is a prodrug for triiodothyronine (T3). TSH treatment would have the advantage of stimulating the physiological ratio of T4 and T3 from the thyroid where the thyroid is normally responsible for 20% of circulating T3 and 100% of T4. There is some evidence that TSH itself may be important in maintaining the integrity of other tissues such as bone and this could be an advantage of TSH therapy. Upto 50% of patients with hypothyroidism have a poor health related quality of life and potentially TSH therapy where appropriate maybe be of benefit.

[0007] TSH receptor antagonists could be used in situations where TSH levels are elevated and causing thyrotoxicosis or in situations where the TSH receptor is being activated by other molecules such as TSH receptor activating antibodies in Graves's disease. Thyrotoxicosis due to high TSH levels is uncommon but difficult to treat and due to TSHomas of the pituitary. A TSH receptor antagonist could be of value to control the thyroid in patients with TSH excess or TSH receptor activation. In Graves's disease the usual approach is to block thyroid hormone release form the thyroid using drugs such as carbimazole and propythiouracil. A TSH receptor antagonist could be used to treat Graves by directly preventing the TSH receptor antibodies activating the TSH receptor. This may have the added advantage of reducing the recurrence of Graves which occurs in 50% of patients. It has been considered that if you could reduce the antigen exposure in Graves, and the antigen is considered to be the TSH receptor, then you might reduce recurrence of Graves's disease. Complications of Graves's diseases include Graves's opthalamopathy with propotosis and damage to the eyes, pretibial myxoedema, osteopaenia and osteoporosis, myopathy, cardiomyopathy, atrial fibrillation, and dementia. Some if not all of these maybe related to expression of TSH receptor in other tissues such as intraorbital fat and muscle of the eye. In the situation of complications of Graves's disease a TSH receptor antagonist could prevent or reduce the complications of Graves's disease specifically thyroid associated opthalmopathy. The foetus in utero or newborn baby maybe at risk of neonatal thyrotoxicosis if the mother has Graves's diseases or has been treated for Graves's disease. The Graves antibodies can cross the placenta and cause thyrotoxicosis in the foetus or infant. A TSH receptor antagonist could be a therapy for neonatal thyrotoxicosis.

[0008] A problem associated with therapeutic peptides and therapeutic polypeptides is that the subject administered the peptide/polypeptide agent clears the molecule in some cases in a matter of minutes. This is due in part to proteolytic degradation and renal filtration. In many cases this is addressed by providing a combined formulation of peptide agent with a second agent that modulates the release of the peptide after administration.

[0009] The present disclosure addresses the problem of maintaining systemic levels of polypeptide therapeutics by reducing loss via proteolytic cleavage, renal filtration or any other means by which a pharmaceutically effective amount of polypeptide are reduced.

[0010] According to an aspect of the invention there is provided a fusion protein comprising Thyroid Stimulating Hormone α [TSHα] and/or Thyroid Stimulating Hormone β [TSHβ] wherein TSHα and/or TSHβ is optionally linked, either directly or indirectly, to the binding domain of TSH receptor.

[0011] In a preferred embodiment of the invention said fusion protein is an agonist.

[0012] In an alternative preferred embodiment of the invention said fusion protein is an antagonist.

[0013] In a preferred embodiment of the invention TSHα and/or TSHβ is linked to said receptor binding domain and is positioned amino terminal to said receptor binding domain in said fusion protein.

[0014] In an alternative preferred embodiment of the invention TSHα and/or TSHβ is linked to said receptor binding domain and is positioned carboxyl-terminal to said binding domain in said fusion protein.

[0015] In a preferred embodiment of the invention TSHα and/or TSHβ is linked to the receptor binding domain by a peptide linker; preferably a flexible peptide linker.

[0016] In a preferred embodiment of the invention said peptide linking molecule comprises at least one copy of the peptide Gly Gly Gly Gly Ser.

[0017] In a preferred embodiment of the invention said peptide linking molecule comprises 1-10 copies of the peptide Gly Gly Gly Gly Ser.

[0018] In a preferred embodiment of the invention said peptide linking molecule comprises 2, 3, 4, 5, 6, 7, 8, 9 and 10 copies of the peptide Gly Gly Gly Gly Ser. Preferably said peptide linking molecule comprises 4 or 7 copies.

[0019] In an alternative preferred embodiment of the invention said peptide linker comprises an inflexible helical region.

[0020] In an embodiment of the invention a flexible non-helical region is located at or near the amino-terminal end of the peptide linker molecule thereby allowing the orientation of TSHα and/or TSHβ located at the amino-terminal end of the peptide linker molecule in relation to said TSH receptor binding domain.

[0021] In an alternative embodiment of the invention a flexible non-helical region is located at or near the carboxyl-terminal end of the peptide linker molecule thereby allowing the orientation of TSHα and/or TSHβ located at the carboxyl-terminal end of the peptide linker molecule in relation to said TSH receptor binding domain.

[0022] In a still further embodiment of the invention a flexible non-helical region is located at or near the amino and the carboxyl-terminal ends of the peptide linker molecule linking the TSHα and/or TSHβ and TSH receptor binding domains.

[0023] In a preferred embodiment of the invention the inflexible helical region comprises at least one copy of the motif A(EAAAK)ₓA.

[0024] The length of the inflexible non-helical region is extendable by increasing the number of repeats of this A (EAAAK)ₓA motif.

[0025] In a preferred embodiment of the invention, x in the A (EAAAK)ₓA motif is less than 5 copies. Even more preferably still x is selected from 1, 2, 3, 4 or 5 copies.

[0026] In a preferred embodiment of the invention said linker consists of an inflexible alpha helical linker between said peptide binding domain and said receptor binding domain.

[0027] In a preferred embodiment of the invention said peptide linker molecule is modified to include at least one motif for the addition of at least one sugar moiety.

[0028] In a preferred embodiment of the invention said peptide linker molecule comprises at least one copy of the motif (Xaa₁ Xaa₂ Xaa₃ Xaa₄ Xaa₅) wherein said motif comprises the glycosylation motif Asn-Xaa-Ser or Asn-Xaa-Thr.

[0029] In a preferred embodiment of the invention said peptide linker comprises at least one copy of an amino acid motif selected from the group consisting of:

Asn₁-Xaa₂-Ser₃ Xaa₄ Xaa₅ wherein Xaa₂ is any amino acid except proline;
Xaa₁ Asn₂-Xaa₃-Ser₄ Xaa₅ wherein Xaa₃ is any amino acid except proline;
Xaa₁ Xaa₂ Asn₃-Xaa₄-Ser₅ wherein Xaa₄ is any amino acid except proline;
Asn₁-Xaa₂-Thr₃ Xaa₄ Xaa₅ wherein Xaa₂ is any amino acid except proline;
Xaa₁ Asn₂-Xaa₃-Thr₄ Xaa₅ wherein Xaa₃ is any amino acid except proline; and
Xaa₁ Xaa₂ Asn₃-Xaa₄-Thr₅ wherein Xaa₄ is any amino acid except proline.

[0030] Preferably said peptide linker comprises at least one copy of a motif selected from the group consisting of:

Asn₁-Xaa₂-Ser₃ Gly₄ Ser₅ wherein Xaa₂ is any amino acid except proline;
Gly₁ Asn₂-Xaa₃-Ser₄ Ser₅ wherein Xaa₃ is any amino acid except proline;
Gly₁ Gly₂ Asn₃-Xaa₄-Ser₅ wherein Xaa₄ is any amino acid except proline;
Asn₁-Xaa₂-Thr₃ Gly₄ Ser₅ wherein Xaa₂ is any amino acid except proline;
Gly₁ Asn₂-Xaa₃-Thr₄ Ser₅ wherein Xaa₃ is any amino acid except proline; and
Gly₁ Gly₂ Asn₃-Xaa₄-Thr₅ wherein Xaa₄ is any amino acid except proline.

[0031] In an alternative preferred embodiment of the invention said peptide linker comprises at least one copy of a motif selected from the group consisting of:

Asn₁-Xaa₂-Ser₃ Ser₄ Gly₅ wherein Xaa₂ is any amino acid except proline;
Ser₁ Asn₂-Xaa₃-Ser₄ Gly₅ wherein Xaa₃ is any amino acid except proline;
Ser₁ Ser₂ Asn₃-Xaa₄-Ser₅ wherein Xaa₄ is any amino acid except proline;
Asn₁-Xaa₂-Thr₃ Ser₄ Gly₅ wherein Xaa₂ is any amino acid except proline;
Ser₁ Asn₂-Xaa₃-Thr₄ Gly₅ wherein Xaa₃ is any amino acid except proline; and
Ser₁ Ser₂ Asn₃-Xaa₄-Thr₅ wherein Xaa₄ is any amino acid except proline.

[0032] In a preferred embodiment of the invention said peptide linker molecule comprises at least one copy of the motif (Xaa₁ Xaa₂ Xaa₃ Xaa₄ Xaa₅) wherein said motif comprises the glycosylation motif Asn-Xaa-Ser or Asn-Xaa-Thr and at least one copy of the motif (Gly Gly Gly Gly Ser) wherein said peptide linker is 5-50 amino acids.

[0033] In a preferred embodiment of the invention said peptide linker comprises at least one copy of the motif (Xaa₁ Xaa₂ Xaa₃ Xaa₄ Xaa₅) wherein said motif comprises the glycosylation motif Asn-Xaa-Ser or Asn-Xaa-Thr and a copy of the motif (Ser Ser Ser Ser Gly) wherein said peptide linker is 5-50 amino acids.

[0034] In a preferred embodiment of the invention said fusion polypeptide linker is modified by the addition of at least one sugar selected from the group consisting of: mannose, galactose, n-acetyl glucosamine, n-acetyl neuraminic, acid n-glycolyl neuraminic acid, n-acetyl galactosamine, fucose, glucose, rhamnose, xylose, or a combinations of sugars, for example in an oligosacharride or scaffolded system.

[0035] Suitable carbohydrate moieties include monosaccharides, oligosaccharides and polysaccharides, and include any carbohydrate moiety that is present in naturally occurring glycoproteins or in biological systems. For example, optionally protected glycosyl or glycoside derivatives, for example optionally-protected glucosyl, glucoside, galactosyl or galactoside derivatives. Glycosyl and glycoside groups include both α and β groups. Suitable carbohydrate moieties include glucose, galactose, fucose, GlcNAc, GalNAc, sialic acid, and mannose, and oligosaccharides or polysaccharides comprising at least one glucose, galactose, fucose, GlcNAc, GalNAc, sialic acid, and/or mannose residue.

[0036] Any functional groups in the carbohydrate moiety may optionally be protected using protecting groups known in the art (see for example Greene et al, “Protecting groups in organic synthesis”, 2nd Edition, Wiley, New York, 1991, the disclosure of which is hereby incorporated by reference). Suitable protecting groups for any —OH groups in the carbohydrate moiety include acetate (Ac), benzyl (Bn), silyl (for example tert-butyl dimethylsilyl (TBDMSi) and tert-butyldiphenylsilyl (TMDPSi)), acetals, ketals, and methoxymethyl (MOM). Any protecting groups may be removed before or after attachment of the carbohydrate moiety to the peptide linker.

[0037] In a preferred embodiment of the invention said sugars are unprotected.

[0038] Particularly preferred carbohydrate moieties include Glc(Ac)₄β-, Glc(Bn)₄β-, Gal(Ac)₄β-, Gal(Bn)₄β-, Glc(Ac)₄α(1,4)Glc(Ac)₃α(1,4)Glc(Ac)₄β-, β-Glc, β-Gal, -Et-β-Gal, -Et-β-Glc, Et-α-Glc, -Et-α-Man, -Et-Lac, -β-Glc(Ac)₂, -β-Glc(Ac)₃, -Et-α-Glc(Ac)₂, -Et-α-Glc(Ac)₃, -Et-α-Glc(Ac)₄, -Et-β-Glc(Ac)₂, -Et-β-Glc(Ac)₃, -Et-β-Glc(Ac)₄, -Et-α-Man(Ac)₃, -Et-α-Man(Ac)₄, -Et-β-Gal(Ac)₃, -Et-β-Gal(Ac)₄, -Et-Lac(Ac)₅, -Et-Lac(Ac)₆, -Et-Lac(Ac)₇, and their deprotected equivalents.

[0039] Preferably, any saccharide units making up the carbohydrate moiety which are derived from naturally occurring sugars will each be in the naturally occurring enantiomeric form, which may be either the D-form (e.g. D-glucose or D-galactose), or the L-form (e.g. L-rhamnose or L-fucose). Any anomeric linkages may be α- or β-linkages.

[0040] In a still further alternative embodiment of the invention said fusion protein does not comprise a peptide linking molecule and is a direct fusion of the peptide and the receptor binding domain.

[0041] In a preferred embodiment of the invention said fusion protein comprises or consists of the amino acid as represented in FIG. 1.

[0042] In a preferred embodiment of the invention said fusion protein comprises or consists of the extracellular domain of the TSH receptor as represented in FIG. 2 with reference to Table 2.

[0043] In a preferred embodiment of the invention said fusion protein is selected from the group consisting of:
[0044] i) a protein comprising an amino acid sequence as represented in FIG. 4a, 4b or 4c;
[0045] ii) a protein comprising an amino acid sequence as represented in FIG. 4a, 4b or 4c that is modified by addition, or deletion or substitution of at least one amino acid residue and that modulates TSH receptor activity.

[0046] In a preferred embodiment of the invention said fusion protein is selected from the group consisting of:
[0047] i) a protein comprising an amino acid sequence as represented in FIG. 5a, 5b or 5c;
[0048] ii) a protein comprising an amino acid sequence as represented in FIG. 5a, 5b or 5c that is modified by addition, or deletion or substitution of at least one amino acid residue and that modulates TSH receptor activity.

[0049] In a preferred embodiment of the invention said fusion protein is selected from the group consisting of:
[0050] i) a protein comprising an amino acid sequence as represented in FIG. 6a, 6b or 6c;
[0051] ii) a protein comprising an amino acid sequence as represented in FIG. 6a, 6b or 6c that is modified by addition, or deletion or substitution of at least one amino acid residue and that modulates TSH receptor activity.

[0052] In a preferred embodiment of the invention said fusion protein is selected from the group consisting of:
[0053] i) a protein comprising an amino acid sequence as represented in FIG. 7a, 7b or 7c;
[0054] ii) a protein comprising an amino acid sequence as represented in FIG. 7a, 7b or 7c that is modified by addition, or deletion or substitution of at least one amino acid residue and that modulates TSH receptor activity.

[0055] In a preferred embodiment of the invention said fusion protein is selected from the group consisting of:
[0056] i) a protein comprising an amino acid sequence as represented in FIG. 8a, 8b or 8c;
[0057] ii) a protein comprising an amino acid sequence as represented in FIG. 8a, 8b or 8c that is modified by addition, or deletion or substitution of at least one amino acid residue and that modulates TSH receptor activity.

[0058] In a preferred embodiment of the invention said fusion protein is selected from the group consisting of:
[0059] i) a protein comprising an amino acid sequence as represented in FIG. 9a, 9b or 9c;
[0060] ii) a protein comprising an amino acid sequence as represented in FIG. 9a, 9b or 9c that is modified by addition, or deletion or substitution of at least one amino acid residue and that modulates TSH receptor activity.

[0061] In a preferred embodiment of the invention said fusion protein is selected from the group consisting of:
[0062] i) a protein comprising an amino acid sequence as represented in FIG. 10a, 10b or 10c;
[0063] ii) a protein comprising an amino acid sequence as represented in FIG. 10a, 10b or 10c that is modified by addition, or deletion or substitution of at least one amino acid residue and that modulates TSH receptor activity.

[0064] In a preferred embodiment of the invention said fusion protein is selected from the group consisting of:
[0065] i) a protein comprising an amino acid sequence as represented in FIG. 11a, 11b or 11c;
[0066] ii) a protein comprising an amino acid sequence as represented in FIG. 11a, 11b or 11c that is modified by addition, or deletion or substitution of at least one amino acid residue and that modulates TSH receptor activity.

[0067] In a preferred embodiment of the invention said fusion protein is selected from the group consisting of:
[0068] i) a protein comprising an amino acid sequence as represented in FIG. 12.1a, 12.2a, 12b or 12c;
[0069] ii) a protein comprising an amino acid sequence as represented in FIG. 12a, 12b or 12c that is modified by addition, or deletion or substitution of at least one amino acid residue and that that modulates TSH receptor activity.

[0070] In a preferred embodiment of the invention said fusion protein is selected from the group consisting of:
[0071] i) a protein comprising an amino acid sequence as represented in FIG. 13a, 13b or 13.1c, 13.2c;
[0072] ii) a protein comprising an amino acid sequence as represented in FIG. 13a, 13b or 13c that is modified by addition, or deletion or substitution of at least one amino acid residue and that that modulates TSH receptor activity.

[0073] In a preferred embodiment of the invention said fusion protein is selected from the group consisting of:
[0074] i) a protein comprising an amino acid sequence as represented in FIG. 14a, 14b or 14c;
[0075] ii) a protein comprising an amino acid sequence as represented in FIG. 14a, 14b or 14c that is modified by addition, or deletion or substitution of at least one amino acid residue and that that modulates TSH receptor activity.

[0076] In a preferred embodiment of the invention said fusion protein is selected from the group consisting of:
[0077] i) a protein comprising an amino acid sequence as represented in FIG. 15a, 15b or 15c;
[0078] ii) a protein comprising an amino acid sequence as represented in FIG. 15a, 15b or 15c that is modified by addition, or deletion or substitution of at least one amino acid residue and that that modulates TSH receptor activity.

[0079] In a preferred embodiment of the invention said fusion protein is selected from the group consisting of:
[0080] i) a protein comprising an amino acid sequence as represented in FIG. 16a, 16b or 16c;
[0081] ii) a protein comprising an amino acid sequence as represented in FIG. 16a, 16b or 16c that is modified by addition, or deletion or substitution of at least one amino acid residue and that that modulates TSH receptor activity.

[0082] In a preferred embodiment of the invention said fusion protein is selected from the group consisting of:
[0083] i) a protein comprising an amino acid sequence as represented in FIG. 17a, 17b or 17c;
[0084] ii) a protein comprising an amino acid sequence as represented in FIG. 17a, 17b or 17c that is modified by addition, or deletion or substitution of at least one amino acid residue and that that modulates TSH receptor activity.

[0085] In a preferred embodiment of the invention said fusion protein is selected from the group consisting of:
[0086] i) a protein comprising an amino acid sequence as represented in FIG. 18a, 18b or 18c;
[0087] ii) a protein comprising an amino acid sequence as represented in FIG. 18a, 18b or 18c that is modified by addition, or deletion or substitution of at least one amino acid residue and that that modulates TSH receptor activity.

[0088] In a preferred embodiment of the invention said fusion protein is selected from the group consisting of:
[0089] i) a protein comprising an amino acid sequence as represented in FIG. 19a, 19b or 19c;
[0090] ii) a protein comprising an amino acid sequence as represented in FIG. 19a, 19b or 19c that is modified by addition, or deletion or substitution of at least one amino acid residue and that that modulates TSH receptor activity.

[0091] In a preferred embodiment of the invention said fusion protein is selected from the group consisting of:
[0092] i) a protein comprising an amino acid sequence as represented in FIG. 20a, 20b or 20c;
[0093] ii) a protein comprising an amino acid sequence as represented in FIG. 20a, 20b or 20c that is modified by addition, or deletion or substitution of at least one amino acid residue and that that modulates TSH receptor activity.

[0094] In a preferred embodiment of the invention said fusion protein is selected from the group consisting of:
[0095] i) a protein comprising an amino acid sequence as represented in FIG. 21a, 21b or 21c;
[0096] ii) a protein comprising an amino acid sequence as represented in FIG. 21a, 21b or 21c that is modified by addition, or deletion or substitution of at least one amino acid residue and that that modulates TSH receptor activity.

[0097] In a preferred embodiment of the invention said fusion protein is selected from the group consisting of:
[0098] i) a protein comprising an amino acid sequence as represented in FIG. 22a, 22b or 22c;
[0099] ii) a protein comprising an amino acid sequence as represented in FIG. 22a, 22b or 22c that is modified by addition, or deletion or substitution of at least one amino acid residue and that that modulates TSH receptor activity.

[0100] In a preferred embodiment of the invention said fusion protein is selected from the group consisting of:
[0101] i) a protein comprising an amino acid sequence as represented in FIG. 23a, 23b or 23c;
[0102] ii) a protein comprising an amino acid sequence as represented in FIG. 23a, 23b or 23c that is modified by addition, or deletion or substitution of at least one amino acid residue and that that modulates TSH receptor activity.

[0103] In a preferred embodiment of the invention said fusion protein is selected from the group consisting of:
[0104] i) a protein comprising an amino acid sequence as represented in FIG. 24a, 24b or 24c;
[0105] ii) a protein comprising an amino acid sequence as represented in FIG. 24a, 24b or 24c that is modified by addition, or deletion or substitution of at least one amino acid residue and that that modulates TSH receptor activity.

[0106] In a preferred embodiment of the invention said fusion protein is selected from the group consisting of:
[0107] i) a protein comprising an amino acid sequence as represented in FIG. 25a, 25b or 25c;
[0108] ii) a protein comprising an amino acid sequence as represented in FIG. 25a, 25b or 25c that is modified by addition, or deletion or substitution of at least one amino acid residue and that that modulates TSH receptor activity.

[0109] In a preferred embodiment of the invention said fusion protein is selected from the group consisting of:
[0110] i) a protein comprising an amino acid sequence as represented in FIG. 26a, 26b or 26c;
[0111] ii) a protein comprising an amino acid sequence as represented in FIG. 26a, 26b or 26c that is modified by addition, or deletion or substitution of at least one amino acid residue and that that modulates TSH receptor activity.

[0112] In a preferred embodiment of the invention said fusion protein is selected from the group consisting of:
[0113] i) a protein comprising an amino acid sequence as represented in FIG. 27a, 27b or 27c;
[0114] ii) a protein comprising an amino acid sequence as represented in FIG. 27a, 27b or 27c that is modified by addition, or deletion or substitution of at least one amino acid residue and that that modulates TSH receptor activity.

[0115] In a preferred embodiment of the invention said fusion protein is selected from the group consisting of:
[0116] i) a protein comprising an amino acid sequence as represented in FIG. 28a, 28b or 28c;
[0117] ii) a protein comprising an amino acid sequence as represented in FIG. 28a, 28b or 28c that is modified by addition, or deletion or substitution of at least one amino acid residue and that that modulates TSH receptor activity.

[0118] In a preferred embodiment of the invention said fusion protein is selected from the group consisting of:
[0119] i) a protein comprising an amino acid sequence as represented in FIG. 29a, 29b or 29c;
[0120] ii) a protein comprising an amino acid sequence as represented in FIG. 29a, 29b or 29c that is modified by addition, or deletion or substitution of at least one amino acid residue and that that modulates TSH receptor activity.

[0121] In a preferred embodiment of the invention said fusion protein is selected from the group consisting of:
[0122] i) a protein comprising an amino acid sequence as represented in FIG. 30a, 30b or 30c;
[0123] ii) a protein comprising an amino acid sequence as represented in FIG. 30a, 30b or 30c that is modified by addition, or deletion or substitution of at least one amino acid residue and that that modulates TSH receptor activity.

[0124] In a preferred embodiment of the invention said fusion protein is selected from the group consisting of:
[0125] i) a protein comprising an amino acid sequence as represented in FIG. 31a, 31b or 31c;
[0126] ii) a protein comprising an amino acid sequence as represented in FIG. 31a, 31b or 31c that is modified by addition, or deletion or substitution of at least one amino acid residue and that that modulates TSH receptor activity.

[0127] In a preferred embodiment of the invention said fusion protein is selected from the group consisting of:
[0128] i) a protein comprising an amino acid sequence as represented in FIG. 32a, 32b or 32c;
[0129] ii) a protein comprising an amino acid sequence as represented in FIG. 32a, 32b or 32c that is modified by addition, or deletion or substitution of at least one amino acid residue and that that modulates TSH receptor activity.

[0130] In a preferred embodiment of the invention said fusion protein is selected from the group consisting of:
[0131] i) a protein comprising an amino acid sequence as represented in FIG. 33a, 33b or 33c;
[0132] ii) a protein comprising an amino acid sequence as represented in FIG. 33a, 33b or 33c that is modified by addition, or deletion or substitution of at least one amino acid residue and that that modulates TSH receptor activity.

[0133] In a preferred embodiment of the invention said fusion protein is selected from the group consisting of:
[0134] i) a protein comprising an amino acid sequence as represented in FIG. 34a, 34b or 34c;
[0135] ii) a protein comprising an amino acid sequence as represented in FIG. 34a, 34b or 34c that is modified by addition, or deletion or substitution of at least one amino acid residue and that that modulates TSH receptor activity.

[0136] In a preferred embodiment of the invention said fusion protein is selected from the group consisting of:
[0137] i) a protein comprising an amino acid sequence as represented in FIG. 35a, 35b or 35c;
[0138] ii) a protein comprising an amino acid sequence as represented in FIG. 35a, 35b or 35c that is modified by addition, or deletion or substitution of at least one amino acid residue and that that modulates TSH receptor activity.

[0139] In a preferred embodiment of the invention said fusion protein is selected from the group consisting of:
[0140] i) a protein comprising an amino acid sequence as represented in FIG. 36a, 36b or 36c;
[0141] ii) a protein comprising an amino acid sequence as represented in FIG. 36a, 36b or 36c that is modified by addition, or deletion or substitution of at least one amino acid residue and that that modulates TSH receptor activity.

[0142] In a preferred embodiment of the invention said fusion protein is selected from the group consisting of:
[0143] i) a protein comprising an amino acid sequence as represented in FIG. 37a, 37b or 37c;
[0144] ii) a protein comprising an amino acid sequence as represented in FIG. 37a, 37b or 37c that is modified by addition, or deletion or substitution of at least one amino acid residue and that that modulates TSH receptor activity.

[0145] In a preferred embodiment of the invention said fusion protein is selected from the group consisting of:
[0146] i) a protein comprising an amino acid sequence as represented in FIG. 38a, 38b or 38c;
[0147] ii) a protein comprising an amino acid sequence as represented in FIG. 38a, 38b or 38c that is modified by addition, or deletion or substitution of at least one amino acid residue and that that modulates TSH receptor activity.

[0148] In a preferred embodiment of the invention said fusion protein is selected from the group consisting of:
[0149] i) a protein comprising an amino acid sequence as represented in FIG. 39a, 39b or 39c;
[0150] ii) a protein comprising an amino acid sequence as represented in FIG. 39a, 39b or 39c that is modified by addition, or deletion or substitution of at least one amino acid residue and that that modulates TSH receptor activity.

[0151] In a preferred embodiment of the invention said fusion protein is selected from the group consisting of:
[0152] i) a protein comprising an amino acid sequence as represented in FIG. 40a, 40b or 40c;
[0153] ii) a protein comprising an amino acid sequence as represented in FIG. 40a, 40b or 40c that is modified by addition, or deletion or substitution of at least one amino acid residue and that that modulates TSH receptor activity.

[0154] In a preferred embodiment of the invention said fusion protein is selected from the group consisting of:
[0155] i) a protein comprising an amino acid sequence as represented in FIG. 41a, 41b or 41c;
[0156] ii) a protein comprising an amino acid sequence as represented in FIG. 41a, 41b or 41c that is modified by addition, or deletion or substitution of at least one amino acid residue and that that modulates TSH receptor activity.

[0157] In a preferred embodiment of the invention said fusion protein is selected from the group consisting of:
[0158] i) a protein comprising an amino acid sequence as represented in FIG. 42a, 42b or 42c;
[0159] ii) a protein comprising an amino acid sequence as represented in FIG. 42a, 42b or 42c that is modified by addition, or deletion or substitution of at least one amino acid residue and that that modulates TSH receptor activity.

[0160] In a preferred embodiment of the invention said fusion protein is selected from the group consisting of:
[0161] i) a protein comprising an amino acid sequence as represented in FIG. 43a, 43b or 43c;
[0162] ii) a protein comprising an amino acid sequence as represented in FIG. 43a, 43b or 43c that is modified by addition, or deletion or substitution of at least one amino acid residue and that that modulates TSH receptor activity.

[0163] In a preferred embodiment of the invention said fusion protein is selected from the group consisting of:
[0164] i) a protein comprising an amino acid sequence as represented in FIG. 44a, 44b or 44c;
[0165] ii) a protein comprising an amino acid sequence as represented in FIG. 44a, 44b or 44c that is modified by addition, or deletion or substitution of at least one amino acid residue and that that modulates TSH receptor activity.

[0166] In a preferred embodiment of the invention said fusion protein is selected from the group consisting of:
[0167] i) a protein comprising an amino acid sequence as represented in FIG. 45a, 45b or 45c;
[0168] ii) a protein comprising an amino acid sequence as represented in FIG. 45a, 45b or 45c that is modified by addition, or deletion or substitution of at least one amino acid residue and that that modulates TSH receptor activity.

[0169] In a preferred embodiment of the invention said fusion protein is selected from the group consisting of:
[0170] i) a protein comprising an amino acid sequence as represented in FIG. 46a, 46b or 46c;
[0171] ii) a protein comprising an amino acid sequence as represented in FIG. 46a, 46b or 46c that is modified by addition, or deletion or substitution of at least one amino acid residue and that that modulates TSH receptor activity.

[0172] In a preferred embodiment of the invention said fusion protein is selected from the group consisting of:
[0173] i) a protein comprising an amino acid sequence as represented in FIG. 47a, 47b or 47c;
[0174] ii) a protein comprising an amino acid sequence as represented in FIG. 47a, 47b or 47c that is modified by addition, or deletion or substitution of at least one amino acid residue and that that modulates TSH receptor activity.

[0175] In a preferred embodiment of the invention said fusion protein is selected from the group consisting of:
[0176] i) a protein comprising an amino acid sequence as represented in FIG. 48a, 48b or 48c;
[0177] ii) a protein comprising an amino acid sequence as represented in FIG. 48a, 48b or 48c that is modified by addition, or deletion or substitution of at least one amino acid residue and that that modulates TSH receptor activity.

[0178] In a preferred embodiment of the invention said fusion protein is selected from the group consisting of:
[0179] i) a protein comprising an amino acid sequence as represented in FIG. 49a, 49b or 49c;
[0180] ii) a protein comprising an amino acid sequence as represented in FIG. 49a, 49b or 49c that is modified by addition, or deletion or substitution of at least one amino acid residue and that that modulates TSH receptor activity.

[0181] In a preferred embodiment of the invention said fusion protein is selected from the group consisting of:
[0182] i) a protein comprising an amino acid sequence as represented in FIG. 50a, 50b or 50c;
[0183] ii) a protein comprising an amino acid sequence as represented in FIG. 50a, 50b or 50c that is modified by addition, or deletion or substitution of at least one amino acid residue and that that modulates TSH receptor activity.

[0184] In a preferred embodiment of the invention said fusion protein is selected from the group consisting of:
[0185] i) a protein comprising an amino acid sequence as represented in FIG. 51a, 51b or 51c;
[0186] ii) a protein comprising an amino acid sequence as represented in FIG. 51a, 51b or 51c that is modified by addition, or deletion or substitution of at least one amino acid residue, and that that modulates TSH receptor activity.

[0187] In a preferred embodiment of the invention said fusion protein is selected from the group consisting of:
[0188] i) a protein comprising an amino acid sequence as represented in FIG. 52a, 52b or 52c;
[0189] ii) a protein comprising an amino acid sequence as represented in FIG. 52a, 52b or 52c that is modified by addition, or deletion or substitution of at least one amino acid residue and that that modulates TSH receptor activity.

[0190] In a preferred embodiment of the invention said fusion protein is selected from the group consisting of:
[0191] i) a protein comprising an amino acid sequence as represented in FIG. 53a, 53b or 53c;
[0192] ii) a protein comprising an amino acid sequence as represented in FIG. 53a, 53b or 53c that is modified by addition, or deletion or substitution of at least one amino acid residue and that that modulates TSH receptor activity.

[0193] In a preferred embodiment of the invention said fusion protein comprises of TSHα and TSHβ linked in tandem; preferably said fusion protein consists of TSHα and TSHβ.

[0194] In a preferred embodiment of the invention said fusion protein comprises first and second TSHα and TSHβ polypeptides.

[0195] In a preferred embodiment of the invention said first and second TSHα and TSH polypeptides are linked in tandem wherein said fusion protein comprises:
[0196] i) TSHβ-TSHα-TSHβ-TSHα; or
[0197] ii) TSHα-TSHβ-TSHβ-TSHα; or
[0198] iii) TSHβ-TSHα-TSHα-TSHβ; or
[0199] iv) TSHα-TSHβ-TSHα-TSHβ.

[0200] In a preferred embodiment of the invention said fusion protein is selected from the group consisting of:
[0201] i) a protein comprising an amino acid sequence as represented in FIG. 54;
[0202] ii) a protein comprising an amino acid sequence as represented in FIG. 54 that is modified by addition, or deletion or substitution of at least one amino acid residue and that that modulates TSH receptor activity.

[0203] In a preferred embodiment of the invention said fusion protein is selected from the group consisting of:
[0204] i) a protein comprising an amino acid sequence as represented in FIG. 55;
[0205] ii) a protein comprising an amino acid sequence as represented in FIG. 55 that is modified by addition, or deletion or substitution of at least one amino acid residue and that that modulates TSH receptor activity.

[0206] In a preferred embodiment of the invention said fusion protein is selected from the group consisting of:
[0207] i) a protein comprising an amino acid sequence as represented in FIG. 56;
[0208] ii) a protein comprising an amino acid sequence as represented in FIG. 56 that is modified by addition, or deletion or substitution of at least one amino acid residue and that that modulates TSH receptor activity.

[0209] In a preferred embodiment of the invention said fusion protein is selected from the group consisting of:
[0210] i) a protein comprising an amino acid sequence as represented in FIG. 57;
[0211] ii) a protein comprising an amino acid sequence as represented in FIG. 57 that is modified by addition, or deletion or substitution of at least one amino acid residue and that that modulates TSH receptor activity.

[0212] In a preferred embodiment of the invention said fusion protein is selected from the group consisting of:
[0213] i) a protein comprising an amino acid sequence as represented in FIG. 58;
[0214] ii) a protein comprising an amino acid sequence as represented in FIG. 58 that is modified by addition, or deletion or substitution of at least one amino acid residue and that that modulates TSH receptor activity.

[0215] In a preferred embodiment of the invention said fusion protein is selected from the group consisting of:
[0216] i) a protein comprising an amino acid sequence as represented in FIG. 59;
[0217] ii) a protein comprising an amino acid sequence as represented in FIG. 59 that is modified by addition, or deletion or substitution of at least one amino acid residue and that that modulates TSH receptor activity.

[0218] In a preferred embodiment of the invention said fusion protein is selected from the group consisting of:
[0219] i) a protein comprising an amino acid sequence as represented in FIG. 60;
[0220] ii) a protein comprising an amino acid sequence as represented in FIG. 60 that is modified by addition, or deletion or substitution of at least one amino acid residue and that that modulates TSH receptor activity.

[0221] In a preferred embodiment of the invention said fusion protein is selected from the group consisting of:
[0222] i) a protein comprising an amino acid sequence as represented in FIG. 61;
[0223] ii) a protein comprising an amino acid sequence as represented in FIG. 61 that is modified by addition, or deletion or substitution of at least one amino acid residue and that that modulates TSH receptor activity.

[0224] The term “modulates” encompasses both activation and inhibition of receptor, for example TSH receptor activation. The disclosed TSH fusion proteins have utility in the treatment of conditions in which TSH receptor activation is desirable. For example, in the pretreatment of patients who are to receive radioactive iodine in the treatment of thyroid cancer and multinodular goiter or thyrotoxicosis. In these clinical conditions TSH is often suppressed and as TSH stimulates iodine uptake into the thyroid there is poor radioactive iodine uptake. Furthermore, TSH fusion proteins herein disclosed will increase radioactive iodine uptake with a greater effect of the radioactivity on the thyroid. TSH fusion proteins can be used to treat secondary hypothyroidism that is hypothyroid patients who have pituitary failure. TSH has anabolic effects on bone turnover and therefore provides a treatment for osteoporosis.

[0225] According to a further aspect of the invention there is provided a method to treat a subject suffering from cancer comprising administering an effective amount of a TSH fusion protein according to the invention.

[0226] According to a further aspect of the invention there is provided a method to treat a subject suffering from multinodular goiter comprising administering an effective amount of a TSH fusion protein according to the invention.

[0227] According to a further aspect of the invention there is provided a method to treat a subject suffering from thyrotoxicosis comprising administering an effective amount of a TSH fusion protein according to the invention.

[0228] According to a further aspect of the invention there is provided a method to treat a subject suffering from secondary hypothyroidism comprising administering an effective amount of a TSH fusion protein according to the invention.

[0229] According to a further aspect of the invention there is provided a method to treat a subject suffering from osteoporosis comprising administering an effective amount of a TSH fusion protein according to the invention.

[0230] According to an aspect of the invention there is provided a nucleic acid molecule that encodes a fusion protein according to the invention.

[0231] According to a further aspect of the invention there is provided a vector comprising a nucleic acid molecule according to the invention.

[0232] In a preferred embodiment of the invention said vector is an expression vector adapted to express the nucleic acid molecule according to the invention.

[0233] A vector including nucleic acid (s) according to the invention need not include a promoter or other regulatory sequence, particularly if the vector is to be used to introduce the nucleic acid into cells for recombination into the genome for stable transfection. Preferably the nucleic acid in the vector is operably linked to an appropriate promoter or other regulatory elements for transcription in a host cell. The vector may be a bi-functional expression vector which functions in multiple hosts. By “promoter” is meant a nucleotide sequence upstream from the transcriptional initiation site and which contains all the regulatory regions required for transcription. Suitable promoters include constitutive, tissue-specific, inducible, developmental or other promoters for expression in eukaryotic or prokaryotic cells. “Operably linked” means joined as part of the same nucleic acid molecule, suitably positioned and oriented for transcription to be initiated from the promoter. DNA operably linked to a promoter is “under transcriptional initiation regulation” of the promoter.

[0234] In a preferred embodiment the promoter is a constitutive, an inducible or regulatable promoter.

[0235] According to a further aspect of the invention there is provided a cell transfected or transformed with a nucleic acid molecule or vector according to the invention.

[0236] Preferably said cell is a eukaryotic cell. Alternatively said cell is a prokaryotic cell.

[0237] In a preferred embodiment of the invention said cell is selected from the group consisting of; a fungal cell (e.g. Pichia spp, Saccharomyces spp, Neurospora spp); insect cell (e.g. Spodoptera spp); a mammalian cell (e.g. COS cell, CHO cell); a plant cell.

[0238] According to a further aspect of the invention there is provided a pharmaceutical composition comprising a polypeptide according to the invention including an excipient or carrier.

[0239] In a preferred embodiment of the invention said pharmaceutical composition is combined with a further therapeutic agent.

[0240] When administered the pharmaceutical composition of the present invention is administered in pharmaceutically acceptable preparations. Such preparations may routinely contain pharmaceutically acceptable concentrations of salt, buffering agents, preservatives, compatible carriers, and optionally other therapeutic agents.

[0241] The pharmaceutical compositions of the invention can be administered by any conventional route, including injection. The administration and application may, for example, be oral, intravenous, intraperitoneal, intramuscular, intracavity, intra-articuar, subcutaneous, topical (eyes), dermal (e.g a cream lipid soluble insert into skin or mucus membrane), transdermal, or intranasal.

[0242] Pharmaceutical compositions of the invention are administered in effective amounts. An “effective amount” is that amount of pharmaceuticals/compositions that alone, or together with further doses or synergistic drugs, produces the desired response. This may involve only slowing the progression of the disease temporarily, although more preferably, it involves halting the progression of the disease permanently. This can be monitored by routine methods or can be monitored according to diagnostic methods.

[0243] The doses of the pharmaceuticals compositions administered to a subject can be chosen in accordance with different parameters, in particular in accordance with the mode of administration used and the state of the subject (i.e. age, sex). When administered, the pharmaceutical compositions of the invention are applied in pharmaceutically-acceptable amounts and in pharmaceutically-acceptable compositions. When used in medicine salts should be pharmaceutically acceptable, but non-pharmaceutically acceptable salts may conveniently be used to prepare pharmaceutically-acceptable salts thereof and are not excluded from the scope of the invention. Such pharmacologically and pharmaceutically-acceptable salts include, but are not limited to, those prepared from the following acids: hydrochloric, hydrobromic, sulfuric, nitric, phosphoric, maleic, acetic, salicylic, citric, formic, malonic, succinic, and the like. Also, pharmaceutically-acceptable salts can be prepared as alkaline metal or alkaline earth salts, such as sodium, potassium or calcium salts.

[0244] The pharmaceutical compositions may be combined, if desired, with a pharmaceutically-acceptable carrier. The term “pharmaceutically-acceptable carrier” as used herein means one or more compatible solid or liquid fillers, diluents or encapsulating substances that are suitable for administration into a human. The term “carrier” denotes an organic or inorganic ingredient, natural or synthetic, with which the active ingredient is combined to facilitate the application. The components of the pharmaceutical compositions also are capable of being co-mingled with the molecules of the present invention, and with each other, in a manner such that there is no interaction that would substantially impair the desired pharmaceutical efficacy.

[0245] The pharmaceutical compositions may contain suitable buffering agents, including: acetic acid in a salt; citric acid in a salt; boric acid in a salt; and phosphoric acid in a salt.

[0246] The pharmaceutical compositions also may contain, optionally, suitable preservatives, such as: benzalkonium chloride; chlorobutanol; parabens and thimerosal.

[0247] The pharmaceutical compositions may conveniently be presented in unit dosage form and may be prepared by any of the methods well-known in the art of pharmacy. All methods include the step of bringing the active agent into association with a carrier that constitutes one or more accessory ingredients. In general, the compositions are prepared by uniformly and intimately bringing the active compound into association with a liquid carrier, a finely divided solid carrier, or both, and then, if necessary, shaping the product.

[0248] Compositions suitable for oral administration may be presented as discrete units, such as capsules, tablets, lozenges, each containing a predetermined amount of the active compound. Other compositions include suspensions in aqueous liquids or non-aqueous liquids such as syrup, elixir or an emulsion.

[0249] Compositions suitable for parenteral administration conveniently comprise a sterile aqueous or non-aqueous preparation that is preferably isotonic with the blood of the recipient. This preparation may be formulated according to known methods using suitable dispersing or wetting agents and suspending agents. The sterile injectable preparation also may be a sterile injectable solution or suspension in a non-toxic parenterally-acceptable diluent or solvent, for example, as a solution in 1,3-butane diol. Among the acceptable solvents that may be employed are water, Ringer's solution, and isotonic sodium chloride solution. In addition, sterile, fixed oils are conventionally employed as a solvent or suspending medium. For this purpose any bland fixed oil may be employed including synthetic mono- or di-glycerides. In addition, fatty acids such as oleic acid may be used in the preparation of injectables. Carrier formulation suitable for oral, subcutaneous, intravenous, intramuscular, etc. administrations can be found in Remington's Pharmaceutical Sciences, Mack Publishing Co., Easton, Pa.

[0250] According to a further aspect of the invention there is provided a method to treat a disease or condition in a subject comprising administering an effective amount of a fusion protein according to the invention.

[0251] According to an aspect of the invention there is provided a method to treat a subject suffering from a cancer comprising administering an effective amount of a TSH fusion protein according to the invention.

[0252] Throughout the description and claims of this specification, the words “comprise” and “contain” and variations of the words, for example “comprising” and “comprises”, means “including but not limited to”, and is not intended to (and does not) exclude other moieties, additives, components, integers or steps.

[0253] Throughout the description and claims of this specification, the singular encompasses the plural unless the context otherwise requires. In particular, where the indefinite article is used, the specification is to be understood as contemplating plurality as well as singularity, unless the context requires otherwise.

[0254] Features, integers, characteristics, compounds, chemical moieties or groups described in conjunction with a particular aspect, embodiment or example of the invention are to be understood to be applicable to any other aspect, embodiment or example described herein unless incompatible therewith.

[0255] An embodiment of the invention will now be described by example only and with reference to the following Tables and figures:

[0256] Table 1 illustrates the domains in full length TSH α and the full length amino acid sequence;

[0257] Table 2 illustrates the domains in full length TSH receptor and the full length amino acid sequence;

[0258] Table 3 illustrates the domains in full length TSH β and the full length amino acid sequence;

[0259] FIG. 1a is the amino acid sequence of unprocessed human TSH β; FIG. 1b is the amino acid sequence of processed human TSH β; FIG. 1c is unprocessed human TSH α; FIG. 1d is processed human TSH α;

[0260] FIG. 2 is the amino acid sequence of human TSH receptor;

[0261] FIG. 3 is a spliced variant of human TSH receptor;

[0262] FIG. 4a-c is the amino acid sequences of human TSH β-α-TSH receptor fusion proteins;

[0263] FIG. 5a-c is the amino acid sequences of human TSH α-β-TSH receptor fusion proteins;

[0264] FIG. 6a-c is the amino acid sequences of human TSH β-TSH receptor fusion proteins;

[0265] FIG. 7a-c is the amino acid sequences of human TSH α-TSH receptor fusion proteins;

[0266] FIG. 8a-c is the amino acid sequences of human TSH receptor-TSHβ-α fusion proteins;

[0267] FIG. 9a-c is the amino acid sequences of human TSH receptor-TSHα-β fusion proteins;

[0268] FIG. 10a-c is the amino acid sequences of human TSH receptor-TSHβ fusion proteins;

[0269] FIG. 11a-c is the amino acid sequences of human TSH receptor-TSHα fusion proteins;

[0270] FIG. 12a-c is the amino acid sequence of human TSHα-TSH receptor-TSH β fusion proteins;

[0271] FIG. 13a-c is the amino acid sequence of human TSHβ-TSH-receptor-TSH α fusion proteins;

[0272] FIG. 14-FIG. 53 is the amino acid sequence of TSHα and/or TSH β fusion proteins linked via a peptide linker that includes a glycosylation motif;

[0273] FIG. 54-58 is the amino acid sequence of TSHα and TSH β tandem fusion polypeptides;

[0274] FIG. 59-61 is the amino acid sequence of TSHα and TSH β tandem fusion polypeptides linked via a peptide linker that includes a glycosylation motif;

[0275] FIG. 62 shows summary and names of three constructs cloned, expressed and tested in the TSH bioassay;

[0276] FIG. 63 shows summary data for screening pools of medium from cells expressing TSH constructs. By ELISA all constructs are expressed at a level of between 0.5 to 2 ug/ml;

[0277] FIG. 64: Western blot of media from cells expressing TSH constructs. Left hand panel is western blot to TSH and right hand panel to TSH receptor. All the constructs are expressed according to western blot with bands at around the predicted size. All constructs demonstrate that they possess both TSH and the TSH receptor;

[0278] FIG. 65 show initial screen in the bioassay. All constructs show positive bioreactivity compared to negative control except for BSTRsa; and

[0279] FIGS. 66a-f show that all constructs show bioactivity in the bioassay.

### MATERIALS AND METHODS

### Cell Line Development

[0280] TSH constructs were cloned into 2 separate mammalian expression vectors with different 5′ UTRs. Each construct was transfected in triplicate into CHO cells. Cells underwent a “preselection” in nucleotide free media and once stabilized further selection was done in the presence of MTX.

### Screening and Selection of Clones

[0281] Individual CHO clones were screened for TSH construct expression by ELISA and western blotting performed on serum free media. For ELISA detection was made both by a polyclonal antibody to TSH and a monoclonal antibody to TSH. For western blotting protein was identified with both a polyclonal antibody to TSH and a polyclonal antibody to TSH receptor. The polyclonal antibody to TSH detects both the alpha and beta chains although giving a higher signal for the alpha chain of TSH.

### TSH Bioassay

[0282] The TSH bioassay was performed in a CHO cell line stably expressing hTSHR and a luciferase reporter. For this assay standard TSH is normally diluted in Hank's Balanced Salt Solution (HBSS) containing BSA. This TSH/HBSS/BSA solution is added to the cells for a 6 hour incubation, followed by measurement of luciferase. For testing media from CHO cells the possibility of matrix interference was studied. To do this TSH at 0.4 μg/mL was spiked into conditioned and unconditioned media. This identified that the media matrix did have a minor inhibitory effect and thus in all assays the negative control was media. Samples were tested neat, and at 1:2, 1:4 dilutions with HBSS/BSA.

### Method for Measuring TSH Construct PK and PD

[0283] Essentially two methods will be used to measure PK and PD. This will be done in rats with no thyroid suppression and in mice where the mouse endogenous TSH has been suppressed with a T3 pellet. Rats will be used for slow release formulation evaluation. Rats will be dosed with TSH construct at 0.5 mg/kg with 6 rats per group and construct measured by ELISA for PK. 7 timepoints will be used (0, 1, 2, 4, 6, 8, 24 hours). In addition, T3 and T4 will be measured at each timepoint for PD. The mouse model has been used previously as a release test for TSH and recently modified for PK purposes. Mice are implanted with T3 pellet to suppress T4, 4-6 days later a dose of TSH or TSH construct is given at 0.4 mg/kg with 10 mice per group and measurement of T4 made at three timepoints (0, 6, 24).

### Recombinant Production of Fusion Proteins

[0284] The components of the fusion proteins were generated by PCR using primers designed to anneal to the ligand or receptor and to introduce suitable restriction sites for cloning into the target vector. The template for the PCR comprised the target gene and was obtained from IMAGE clones, cDNA libraries or from custom synthesised genes. Once the ligand and receptor genes with the appropriate flanking restriction sites had been synthesised, these were then ligated either side of the linker region in the target vector. The construct was then modified to contain the correct linker without flanking restriction sites by the insertion of a custom synthesised length of DNA between two unique restriction sites either side of the linker region, by mutation of the linker region by ssDNA modification techniques, by insertion of a primer duplex/multiplex between suitable restriction sites or by PCR modification.

[0285] Alternatively, the linker with flanking sequence, designed to anneal to the ligand or receptor domains of choice, was initially synthesised by creating an oligonucleotide duplex and this processed to generate double-stranded DNA. PCRs were then performed using the linker sequence as a “megaprimer”, primers designed against the opposite ends of the ligand and receptor to which the “megaprimer” anneals to and with the ligand and receptor as the templates. The terminal primers were designed with suitable restriction sites for ligation into the expression vector of choice.

### Expression and Purification of Fusion Proteins

[0286] Expression was carried out in a suitable system (e.g. mammalian CHO cells, E. coli) and this was dependant on the vector into which the fusion gene was generated. Expression was then analysed using a variety of methods which could include one or more of SDS-PAGE, Native PAGE, western blotting, ELISA.

[0287] Once a suitable level of expression was achieved the fusions were expressed at a larger scale to produce enough protein for purification and subsequent analysis.

[0288] Purification was carried out using a suitable combination of one or more chromatographic procedures such as ion exchange chromatography, hydrophobic interaction chromatography, ammonium sulphate precipitation, gel filtration, size exclusion and/or affinity chromatography (using nickel/cobalt-resin, antibody-immobilised resin and/or ligand/receptor-immobilised resin).

[0289] Purified protein was analysed using a variety of methods which could include one or more of Bradford's assay, SDS-PAGE, Native PAGE, western blotting, ELISA.

### Characterisation of Fusions

[0290] Denaturing PAGE, native PAGE gels and western blotting were used to analyse the fusion polypeptides and western blotting performed with antibodies non-conformationally sensitive to the fusion. Native solution state molecular weight information can be obtained from techniques such as size exclusion chromatography using a Superose G200 analytical column and analytical ultracentrifugation.

1. A fusion protein comprising thyroid stimulating hormone α [TSHα] and/or thyroid stimulating hormone β [TSHβ] wherein TSHα and/or TSHβ is optionally linked, either directly or indirectly, to the binding domain of TSH receptor.

2. A fusion protein according to claim 1 wherein TSHα and/or TSHβ is linked to said receptor binding domain and is positioned amino terminal to said receptor binding domain in said fusion protein.

3. A fusion protein according to claim 1 wherein TSHα and/or TSHβ is linked to said receptor binding domain and is positioned carboxyl-terminal to said binding domain in said fusion protein.

4. A fusion protein according to any of claims 1-3 wherein TSHα and/or TSHβ is linked to the receptor binding domain by a peptide linker.

5. A fusion protein according to claim 4 wherein said peptide linking molecule comprises at least one copy of the peptide Gly Gly Gly Gly Ser.

6. A fusion protein according to claim 5 wherein invention said peptide linking molecule comprises 1-10 copies of the peptide Gly Gly Gly Gly Ser.

7. A fusion protein according to any of claims 1-6 wherein said peptide linker molecule is modified to include at least one motif for the addition of at least one sugar moiety.

8. A fusion protein according to claim 7 wherein said peptide linker molecule comprises at least one copy of the motif (Xaa₁ Xaa₂ Xaa₃ Xaa₄ Xaa₅) wherein said motif comprises the glycosylation motif Asn-Xaa-Ser or Asn-Xaa-Thr.

9. A fusion protein according to any of claims 1-3 wherein said fusion protein does not comprise a peptide linking molecule and is a direct fusion of TSHα and/or TSHβ and the receptor binding domain.

10. A fusion protein according to claim 1 wherein said protein is selected from the group consisting of:
i) a protein comprising an amino acid sequence as represented in FIG. 4a, 4b or 4c;
ii) a protein comprising an amino acid sequence as represented in FIG. 4a, 4b or 4c that is modified by addition, or deletion or substitution of at least one amino acid residue and that modulates TSH receptor activity.

11. A fusion protein according to claim 1 wherein said protein is selected from the group consisting of:
i) a protein comprising an amino acid sequence as represented in FIG. 5a, 5b or 5c;
ii) a protein comprising an amino acid sequence as represented in FIG. 5a, 5b or 5c that is modified by addition, or deletion or substitution of at least one amino acid residue and that modulates TSH receptor activity.

12. A fusion protein according to claim 1 wherein said fprotein is selected from the group consisting of:
i) a protein comprising an amino acid sequence as represented in FIG. 6a, 6b or 6c;
ii) a protein comprising an amino acid sequence as represented in FIG. 6a, 6b or 6c that is modified by addition, or deletion or substitution of at least one amino acid residue and that modulates TSH receptor activity.

13. A fusion protein according to claim 1 wherein said protein is selected from the group consisting of:
i) a protein comprising an amino acid sequence as represented in FIG. 7a, 7b or 7c;
ii) a protein comprising an amino acid sequence as represented in FIG. 7a, 7b or 7c that is modified by addition, or deletion or substitution of at least one amino acid residue and that modulates TSH receptor activity.

14. A fusion protein according to claim 1 wherein said protein is selected from the group consisting of:
i) a protein comprising an amino acid sequence as represented in FIG. 8a, 8b or 8c;
ii) a protein comprising an amino acid sequence as represented in FIG. 8a, 8b or 8c that is modified by addition, or deletion or substitution of at least one amino acid residue and that modulates TSH receptor activity.

15. A fusion protein according to claim 1 wherein said protein is selected from the group consisting of:
i) a protein comprising an amino acid sequence as represented in FIG. 9a, 9b or 9c;
ii) a protein comprising an amino acid sequence as represented in FIG. 9a, 9b or 9c that is modified by addition, or deletion or substitution of at least one amino acid residue and that modulates TSH receptor activity.

16. A fusion protein according to claim 1 wherein said protein is selected from the group consisting of:
i) a protein comprising an amino acid sequence as represented in FIG. 10a, 10b or 10c;
ii) a protein comprising an amino acid sequence as represented in FIG. 10a, 10b or 10c that is modified by addition, or deletion or substitution of at least one amino acid residue and that modulates TSH receptor activity.

17. A fusion protein according to claim 1 wherein said protein is selected from the group consisting of:
i) a protein comprising an amino acid sequence as represented in FIG. 11a, 11b or 11c;
ii) a protein comprising an amino acid sequence as represented in FIGS. 11a, 11b or 11c that is modified by addition, or deletion or substitution of at least one amino acid residue and that modulates TSH receptor activity.

18. A fusion protein according to claim 1 wherein said protein is selected from the group consisting of:
i) a protein comprising an amino acid sequence as represented in FIG. 12.1a, 12.2a, 12b or 12c;
ii) a protein comprising an amino acid sequence as represented in FIG. 12a, 12b or 12c that is modified by addition, or deletion or substitution of at least one amino acid residue and that that modulates TSH receptor activity.

19. A fusion protein according to claim 1 wherein said protein is selected from the group consisting of:
i) a protein comprising an amino acid sequence as represented in FIG. 13.1a, 13.2a, 13b or 13c;
ii) a protein comprising an amino acid sequence as represented in FIG. 13a, 13b or 13c that is modified by addition, or deletion or substitution of at least one amino acid residue and that that modulates TSH receptor activity.

20. A fusion protein according to claim 1 wherein said fusion protein is selected from the group consisting of:
i) a protein comprising an amino acid sequence as represented in FIG. 14a, 14b or 14c;
ii) a protein comprising an amino acid sequence as represented in FIG. 14a, 14b or 14c that is modified by addition, or deletion or substitution of at least one amino acid residue and that that modulates TSH receptor activity.

21. A fusion protein according to claim 1 wherein said fusion protein is selected from the group consisting of:
i) a protein comprising an amino acid sequence as represented in FIG. 15a, 15b or 15c;
ii) a protein comprising an amino acid sequence as represented in FIG. 15a, 15b or 15c that is modified by addition, or deletion or substitution of at least one amino acid residue and that that modulates TSH receptor activity.

22. A fusion protein according to claim 1 wherein said protein is selected from the group consisting of:
i) a protein comprising an amino acid sequence as represented in FIG. 16a, 16b or 16c;
ii) a protein comprising an amino acid sequence as represented in FIG. 16a, 16b or 16c that is modified by addition, or deletion or substitution of at least one amino acid residue and that that modulates TSH receptor activity.

23. A fusion protein according to claim 1 wherein said protein is selected from the group consisting of:
iii) a protein comprising an amino acid sequence as represented in FIG. 17a, 17b or 17c;
iv) a protein comprising an amino acid sequence as represented in FIG. 17a, 17b or 17c that is modified by addition, or deletion or substitution of at least one amino acid residue and that that modulates TSH receptor activity.

24. A fusion protein according to claim 1 wherein said protein is selected from the group consisting of:
i) a protein comprising an amino acid sequence as represented in FIG. 18a, 18b or 18c;
ii) a protein comprising an amino acid sequence as represented in FIG. 18a, 18b or 18c that is modified by addition, or deletion or substitution of at least one amino acid residue and that that modulates TSH receptor activity.

25. A fusion protein according to claim 1 wherein said protein is selected from the group consisting of:
i) a protein comprising an amino acid sequence as represented in FIG. 19a, 19b or 19c;
ii) a protein comprising an amino acid sequence as represented in FIG. 19a, 19b or 19c that is modified by addition, or deletion or substitution of at least one amino acid residue and that that modulates TSH receptor activity.

26. A fusion protein according to claim 1 wherein said protein is selected from the group consisting of:
i) a protein comprising an amino acid sequence as represented in FIG. 20a, 20b or 20c;
ii) a protein comprising an amino acid sequence as represented in FIG. 20a, 20b or 20c that is modified by addition, or deletion or substitution of at least one amino acid residue and that that modulates TSH receptor activity.

27. A fusion protein according to claim 1 wherein said protein is selected from the group consisting of:
i) a protein comprising an amino acid sequence as represented in FIG. 21a, 21b or 21c;
ii) a protein comprising an amino acid sequence as represented in FIG. 21a, 21b or 21c that is modified by addition, or deletion or substitution of at least one amino acid residue and that that modulates TSH receptor activity.

28. A fusion protein according to claim 1 wherein said fusion protein is selected from the group consisting of:
i) a protein comprising an amino acid sequence as represented in FIG. 22a, 22b or 22c;
ii) a protein comprising an amino acid sequence as represented in FIG. 22a, 22b or 22c that is modified by addition, or deletion or substitution of at least one amino acid residue and that that modulates TSH receptor activity.

29. A fusion protein according to claim 1 wherein said protein is selected from the group consisting of:
i) a protein comprising an amino acid sequence as represented in FIG. 23a, 23b or 23c;
ii) a protein comprising an amino acid sequence as represented in FIG. 23a, 23b or 23c that is modified by addition, or deletion or substitution of at least one amino acid residue and that that modulates TSH receptor activity.

30. A fusion protein according to claim 1 wherein said protein is selected from the group consisting of:
i) a protein comprising an amino acid sequence as represented in FIG. 24a, 24b or 24c;
ii) a protein comprising an amino acid sequence as represented in FIG. 24a, 24b or 24c that is modified by addition, or deletion or substitution of at least one amino acid residue and that that modulates TSH receptor activity.

31. A fusion protein according to claim 1 wherein said protein is selected from the group consisting of:
i) a protein comprising an amino acid sequence as represented in FIG. 25a, 25b or 25c;
ii) a protein comprising an amino acid sequence as represented in FIG. 25a, 25b or 25c that is modified by addition, or deletion or substitution of at least one amino acid residue and that that modulates TSH receptor activity.

32. A fusion protein according to claim 1 wherein said protein is selected from the group consisting of:
i) a protein comprising an amino acid sequence as represented in FIG. 26a, 26b or 26c;
ii) a protein comprising an amino acid sequence as represented in FIG. 26a, 26b or 26c that is modified by addition, or deletion or substitution of at least one amino acid residue and that that modulates TSH receptor activity.

33. A fusion protein according to claim 1 wherein said protein is selected from the group consisting of:
i) a protein comprising an amino acid sequence as represented in FIG. 27a, 27b or 27c;
ii) a protein comprising an amino acid sequence as represented in FIG. 27a, 27b or 27c that is modified by addition, or deletion or substitution of at least one amino acid residue and that that modulates TSH receptor activity.

34. A fusion protein according to claim 1 wherein said protein is selected from the group consisting of:
i) a protein comprising an amino acid sequence as represented in FIG. 28a, 28b or 28c;
ii) a protein comprising an amino acid sequence as represented in FIG. 28a, 28b or 28c that is modified by addition, or deletion or substitution of at least one amino acid residue and that that modulates TSH receptor activity.

35. A fusion protein according to claim 1 wherein said protein is selected from the group consisting of:
i) a protein comprising an amino acid sequence as represented in FIG. 29a, 29b or 29c;
ii) a protein comprising an amino acid sequence as represented in FIG. 29a, 29b or 29c that is modified by addition, or deletion or substitution of at least one amino acid residue and that that modulates TSH receptor activity.

36. A fusion protein according to claim 1 wherein said protein is selected from the group consisting of:
i) a protein comprising an amino acid sequence as represented in FIG. 30a, 30b or 30c;
ii) a protein comprising an amino acid sequence as represented in FIG. 30a, 30b or 30c that is modified by addition, or deletion or substitution of at least one amino acid residue and that that modulates TSH receptor activity.

37. A fusion protein according to claim 1 wherein said protein is selected from the group consisting of:
i) a protein comprising an amino acid sequence as represented in FIG. 31a, 31b or 31c;
ii) a protein comprising an amino acid sequence as represented in FIG. 31a, 31b or 31c that is modified by addition, or deletion or substitution of at least one amino acid residue and that that modulates TSH receptor activity.

38. A fusion protein according to claim 1 wherein said fusion protein is selected from the group consisting of:
i) a protein comprising an amino acid sequence as represented in FIG. 32a, 32b or 32c;
ii) a protein comprising an amino acid sequence as represented in FIG. 32a, 32b or 32c that is modified by addition, or deletion or substitution of at least one amino acid residue and that that modulates TSH receptor activity.

39. A fusion protein according to claim 1 wherein said protein is selected from the group consisting of:
i) a protein comprising an amino acid sequence as represented in FIG. 33a, 33b or 33c;
ii) a protein comprising an amino acid sequence as represented in FIG. 33a, 33b or 33c that is modified by addition, or deletion or substitution of at least one amino acid residue and that that modulates TSH receptor activity.

40. A fusion protein according to claim 1 wherein said protein is selected from the group consisting of:
i) a protein comprising an amino acid sequence as represented in FIG. 34a, 34b or 34c;
ii) a protein comprising an amino acid sequence as represented in FIG. 34a, 34b or 34c that is modified by addition, or deletion or substitution of at least one amino acid residue and that that modulates TSH receptor activity.

41. A fusion protein according to claim 1 wherein said protein is selected from the group consisting of:
i) a protein comprising an amino acid sequence as represented in FIG. 35a, 35b or 35c;
ii) a protein comprising an amino acid sequence as represented in FIG. 35a, 35b or 35c that is modified by addition, or deletion or substitution of at least one amino acid residue and that that modulates TSH receptor activity.

42. A fusion protein according to claim 1 wherein said protein is selected from the group consisting of:
i) a protein comprising an amino acid sequence as represented in FIG. 36a, 36b or 36c;
ii) a protein comprising an amino acid sequence as represented in FIG. 36a, 36b or 36c that is modified by addition, or deletion or substitution of at least one amino acid residue and that that modulates TSH receptor activity.

43. A fusion protein according to claim 1 wherein said protein is selected from the group consisting of:
i) a protein comprising an amino acid sequence as represented in FIG. 37a, 37b or 37c;
ii) a protein comprising an amino acid sequence as represented in FIG. 37a, 37b or 37c that is modified by addition, or deletion or substitution of at least one amino acid residue and that that modulates TSH receptor activity.

44. A fusion protein according to claim 1 wherein said protein is selected from the group consisting of:
i) a protein comprising an amino acid sequence as represented in FIG. 38a, 38b or 38c;
ii) a protein comprising an amino acid sequence as represented in FIG. 38a, 38b or 38c that is modified by addition, or deletion or substitution of at least one amino acid residue and that that modulates TSH receptor activity.

45. A fusion protein according to claim 1 wherein said protein is selected from the group consisting of:
i) a protein comprising an amino acid sequence as represented in FIG. 39a, 39b or 39c;
ii) a protein comprising an amino acid sequence as represented in FIG. 39a, 39b or 39c that is modified by addition, or deletion or substitution of at least one amino acid residue and that that modulates TSH receptor activity.

46. A fusion protein according to claim 1 wherein said protein is selected from the group consisting of:
i) a protein comprising an amino acid sequence as represented in FIG. 40a, 40b or 40c;
ii) a protein comprising an amino acid sequence as represented in FIG. 40a, 40b or 40c that is modified by addition, or deletion or substitution of at least one amino acid residue and that that modulates TSH receptor activity.

47. A fusion protein according to claim 1 wherein said protein is selected from the group consisting of:
i) a protein comprising an amino acid sequence as represented in FIG. 41a, 41b or 41c;
ii) a protein comprising an amino acid sequence as represented in FIG. 41a, 41b or 41c that is modified by addition, or deletion or substitution of at least one amino acid residue and that that modulates TSH receptor activity.

48. A fusion protein according to claim 1 wherein said protein is selected from the group consisting of:
i) a protein comprising an amino acid sequence as represented in FIG. 42a, 42b or 42c;
ii) a protein comprising an amino acid sequence as represented in FIG. 42a, 42b or 42c that is modified by addition, or deletion or substitution of at least one amino acid residue and that that modulates TSH receptor activity.

49. A fusion protein according to claim 1 wherein said protein is selected from the group consisting of:
i) a protein comprising an amino acid sequence as represented in FIG. 43a, 43b or 43c;
ii) a protein comprising an amino acid sequence as represented in FIG. 43a, 43b or 43c that is modified by addition, or deletion or substitution of at least one amino acid residue and that that modulates TSH receptor activity.

50. A fusion protein according to claim 1 wherein protein is selected from the group consisting of:
i) a protein comprising an amino acid sequence as represented in FIG. 44a, 44b or 44c;
ii) a protein comprising an amino acid sequence as represented in FIG. 44a, 44b or 44c that is modified by addition, or deletion or substitution of at least one amino acid residue and that that modulates TSH receptor activity.

51. A fusion protein according to claim 1 wherein said protein is selected from the group consisting of:
i) a protein comprising an amino acid sequence as represented in FIG. 45a, 45b or 45c;
ii) a protein comprising an amino acid sequence as represented in FIG. 45a, 45b or 45c that is modified by addition, or deletion or substitution of at least one amino acid residue and that that modulates TSH receptor activity.

52. A fusion protein according to claim 1 wherein said protein is selected from the group consisting of:
i) a protein comprising an amino acid sequence as represented in FIG. 46a, 46b or 46c;
ii) a protein comprising an amino acid sequence as represented in FIG. 46a, 46b or 46c that is modified by addition, or deletion or substitution of at least one amino acid residue and that that modulates TSH receptor activity.

53. A fusion protein according to claim 1 wherein said protein is selected from the group consisting of:
i) a protein comprising an amino acid sequence as represented in FIG. 47a, 47b or 47c;
ii) a protein comprising an amino acid sequence as represented in FIG. 47a, 47b or 47c that is modified by addition, or deletion or substitution of at least one amino acid residue and that that modulates TSH receptor activity.

54. A fusion protein according to claim 1 wherein said protein is selected from the group consisting of:
i) a protein comprising an amino acid sequence as represented in FIG. 48a, 48b or 48c;
ii) a protein comprising an amino acid sequence as represented in FIG. 48a, 48b or 48c that is modified by addition, or deletion or substitution of at least one amino acid residue and that that modulates TSH receptor activity.

55. A fusion protein according to claim 1 wherein said protein is selected from the group consisting of:
i) a protein comprising an amino acid sequence as represented in FIG. 49a, 49b or 49c;
ii) a protein comprising an amino acid sequence as represented in FIG. 49a, 49b or 49c that is modified by addition, or deletion or substitution of at least one amino acid residue and that that modulates TSH receptor activity.

56. A fusion protein according to claim 1 wherein said protein is selected from the group consisting of:
i) a protein comprising an amino acid sequence as represented in FIG. 50a, 50b or 50c;
ii) a protein comprising an amino acid sequence as represented in FIG. 50a, 50b or 50c that is modified by addition, or deletion or substitution of at least one amino acid residue and that that modulates TSH receptor activity.

57. A fusion protein according to claim 1 wherein said protein is selected from the group consisting of:
i) a protein comprising an amino acid sequence as represented in FIG. 51a, 51b or 51c;
ii) a protein comprising an amino acid sequence as represented in FIG. 51a, 51b or 51c that is modified by addition, or deletion or substitution of at least one amino acid residue and that that modulates TSH receptor activity.

58. A fusion protein according to claim 1 wherein said protein is selected from the group consisting of:
i) a protein comprising an amino acid sequence as represented in FIG. 52a, 52b or 52c;
ii) a protein comprising an amino acid sequence as represented in FIG. 52a, 52b or 52c that is modified by addition, or deletion or substitution of at least one amino acid residue and that that modulates TSH receptor activity.

59. A fusion protein according to claim 1 wherein said protein is selected from the group consisting of:
i) a protein comprising an amino acid sequence as represented in FIG. 53a, 53b or 53c;
ii) a protein comprising an amino acid sequence as represented in FIG. 53a, 53b or 53c that is modified by addition, or deletion or substitution of at least one amino acid residue and that that modulates TSH receptor activity.

60. A fusion protein according to claim 1 wherein said fusion protein comprises of TSHα and TSHβ linked in tandem.

61. A fusion protein according to claim 60 wherein said fusion protein comprises first and second TSHα and TSHβ polypeptides.

62. A fusion protein according to claim 61 wherein said first and second TSHα and TSHβ polypeptides are linked in tandem wherein said fusion protein comprises:
i) TSHβ-TSHα-TSHβ-TSHα; or
ii) TSHα-TSHβ-TSHβ-TSHα; or
iii) TSHβ-TSHα-TSHα-TSHβ; or
iv) TSHα-TSHβ-TSHα-TSHβ.

63. A fusion protein according to any of claims 60-62 wherein said protein is selected from the group consisting of:
i) a protein comprising an amino acid sequence as represented in FIG. 54;
ii) a protein comprising an amino acid sequence as represented in FIG. 54 that is modified by addition, or deletion or substitution of at least one amino acid residue and that that modulates TSH receptor activity.

64. A fusion protein according to any of claims 60-62 wherein said protein is selected from the group consisting of:
i) a protein comprising an amino acid sequence as represented in FIG. 55;
ii) a protein comprising an amino acid sequence as represented in FIG. 55 that is modified by addition, or deletion or substitution of at least one amino acid residue and that that modulates TSH receptor activity.

65. A fusion protein according to any of claims 60-62 wherein said protein is selected from the group consisting of:
i) a protein comprising an amino acid sequence as represented in FIG. 56;
ii) a protein comprising an amino acid sequence as represented in FIG. 56 that is modified by addition, or deletion or substitution of at least one amino acid residue and that that modulates TSH receptor activity.

66. A fusion protein according to any of claims 60-62 wherein said protein is selected from the group consisting of:
i) a protein comprising an amino acid sequence as represented in FIG. 57;
ii) a protein comprising an amino acid sequence as represented in FIG. 57 that is modified by addition, or deletion or substitution of at least one amino acid residue and that that modulates TSH receptor activity.

67. A fusion protein according to any of claims 60-62 wherein said protein is selected from the group consisting of:
i) a protein comprising an amino acid sequence as represented in FIG. 58;
ii) a protein comprising an amino acid sequence as represented in FIG. 58 that is modified by addition, or deletion or substitution of at least one amino acid residue and that that modulates TSH receptor activity.

68. A fusion protein according to any of claims 60-62 wherein said protein is selected from the group consisting of:
i) a protein comprising an amino acid sequence as represented in FIG. 59;
ii) a protein comprising an amino acid sequence as represented in FIG. 59 that is modified by addition, or deletion or substitution of at least one amino acid residue and that that modulates TSH receptor activity.

69. A fusion protein according to any of claims 60-62 wherein said protein is selected from the group consisting of:
i) a protein comprising an amino acid sequence as represented in FIG. 60;
ii) a protein comprising an amino acid sequence as represented in FIG. 60 that is modified by addition, or deletion or substitution of at least one amino acid residue and that that modulates TSH receptor activity.

70. A fusion protein according to any of claims 60-62 wherein said fusion protein is selected from the group consisting of:
i) a protein comprising an amino acid sequence as represented in FIG. 61;
ii) a protein comprising an amino acid sequence as represented in FIG. 61 that is modified by addition, or deletion or substitution of at least one amino acid residue and that that modulates TSH receptor activity.

71. A nucleic acid molecule that encodes a fusion protein according to any of claims 1-70.

72. A vector comprising a nucleic acid molecule according to claim 71.

73. A cell transfected or transformed with a nucleic acid molecule or vector according to claim 71 or 72.

74. A pharmaceutical composition comprising a polypeptide according to any of claims 1-70 including an excipient or carrier.

75. A pharmaceutical composition according to claim 74 wherein said polypeptide is combined with a further therapeutic agent.

76. A method to treat a subject suffering from thyroid cancer comprising administering an effective amount of a TSH fusion protein according to any of claims 1-70.

77. A method to treat a subject suffering from multinodular goiter comprising administering an effective amount of a TSH fusion protein according to any of claims 1-70.

78. A method to treat a subject suffering from thyrotoxicosis comprising administering an effective amount of a TSH fusion protein according to any of claims 1-70.

79. A method to treat a subject suffering from secondary hypothyroidism comprising administering an effective amount of a TSH fusion protein according to any of claims 1-70.

80. A method to treat a subject suffering from osteoporosis comprising administering an effective amount of a TSH fusion protein according to any of claims 1-70.

The application's sequence listing, which the Patent Office published only in electronic form, follows.

SEQUENCE LISTING (192 sequences)

SEQ ID NO: 1 - protein, 138 aa, Homo sapiens
MTALFLMSMLFGLACGQAMSFCIPTEYTMHIERRECAYCLTINTTICAGYCMTRDINGKLFLPKYALSQDVCTYRDFIYRTVEIPGCPLHVAPYFSYPVALSCKCGKCNTDYSDCIHEAIKTNYCTKPQKSYLVGFSV

SEQ ID NO: 2 - protein, 110 aa, Homo sapiens
FCIPTEYTMHIERRECAYCLTINTTICAGYCMTRDINGKLFLPKYALSQDVCTYRDFIYRTVEIPGCPLHVAPYFSYPVALSCKCGKCNTDYSDCIHEAIKTNYCTKPQK

SEQ ID NO: 3 - protein, 115 aa, Homo sapiens
MDYYRKYAAIFLVTLSVFLHVLHSAPDVQDCPECTLQENPFFSQPGAPILQCMGCCFSAYPTPLRSKKTMLVQKNVTSESTCCVAKSYNRVTVMGGFKVENHTACHCSTCYYHKS

SEQ ID NO: 4 - protein, 91 aa, Homo sapiens
APDVQDCPECTLQENPFFSQPGAPILQCMGCCFSAYPTPLRSKKTMLVQKNVTSESTCCVAKSYNRVTVMGGFKVENHTACHCSTCYYHKS

SEQ ID NO: 5 - protein, 764 aa, Homo sapiens
MRPADLLQLVLLLDLPRDLGGMGCSSPPCECHQEEDFRVTCKDIQRIPSLPPSTQTLKLIETHLRTIPSHAFSNLPNISRIYVSIDVTLQQLESHSFYNLSKVTHIEIRNTRNLTYIDPDALKELPLLKFLGIFNTGLKMFPDLTKVYSTDIFFILEITDNPYMTSIPVNAFQGLCNETLTLKLYNNGFTSVQGYAFNGTKLDAVYLNKNKYLTVIDKDAFGGVYSGPSLLDVSQTSVTALPSKGLEHLKELIARNTWTLKKLPLSLSFLHLTRADLSYPSHCCAFKNQKKIRGILESLMCNESSMQSLRQRKSVNALNSPLHQEYEENLGDSIVGYKEKSKFQDTHNNAHYYVFFEEQEDEIIGFGQELKNPQEETLQAFDSHYDYTICGDSEDMVCTPKSDEFNPCEDIMGYKFLRIVVWFVSLLALLGNVFVLLILLTSHYKLNVPRFLMCNLAFADFCMGMYLLLIASVDLYTHSEYYNHAIDWQTGPGCNTAGFFTVFASELSVYTLTVITLERWYAITFAMRLDRKIRLRHACAIMVGGWVCCFLLALLPLVGISSYAKVSICLPMDTETPLALAYIVFVLTLNIVAFVIVCCCYVKIYITVRNPQYNPGDKDTKIAKRMAVLIFTDFICMAPISFYALSAILNKPLITVSNSKILLVLFYPLNSCANPFLYAIFTKAFQRDVFILLSKFGICKRQAQAYRGQRVPPKNSTDIQVQKVTHDMRQGLHNMEDVYELIENSHLTPKKQGQISEEYMQTVL

SEQ ID NO: 6 - protein, 252 aa, Homo sapiens
MRPADLLQLVLLLDLPRDLGGMGCSSPPCECHQEEDFRVTCKDIQRIPSLPPSTQTLKLIETHLRTIPSHAFSNLPNISRIYVSIDVTLQQLESHSFYNLSKVTHIEIRNTRNLTYIDPDALKELPLLKFLGIFNTGLKMFPDLTKVYSTDIFFILEITDNPYMTSIPVNAFQGLCNETLTLKLYNNGFTSVQGYAFNGTKLDAVYLNKNKYLTVIDKDAFGGVYSGPSLLLPLGRKSLSFETQKAPSSSTP

SEQ ID NO: 7 - protein, 510 aa, Artificial
  TSH beta alpha fusion protein
FCIPTEYTMHIERRECAYCLTINTTICAGYCMTRDINGKLFLPKYALSQDVCTYRDFIYRTVEIPGCPLHVAPYFSYPVALSCKCGKCNTDYSDCIHEAIKTNYCTKPQKSYGGGGSGGGGSGGGGSGGGGSAPDVQDCPECTLQENPFFSQPGAPILQCMGCCFSRAYPTPLRSKKTMLVQKNVTSESTCCVAKSYNRVTVMGGFKVENHTACHCSTCYYHKSGGGGSGGGGSGGGGSGGGGSGGGGSGGGGSGMGCSSPPCECHQEEDFRVTCKDIQRIPSLPPSTQTLKLIETHLRTIPSHAFSNLPNISRIYVSIDVTLQQLESHSFYNLSKVTHIEIRNTRNLTYIDPDALKELPLLKFLGIFNTGLKMFPDLTKVYSTDIFFILEITDNPYMTSIPVNAFQGLCNETLTLKLYNNGFTSVQGYAFNGTKLDAVYLNKNKYLTVIDKDAFGGVYSGPSLLDVSQTSVTALPSKGLEHLKELIARNTWTLKKLPLSLSFLHLTRAD

SEQ ID NO: 8 - protein, 485 aa, Artificial
  TSH beta alpha fusion protein
FCIPTEYTMHIERRECAYCLTINTTICAGYCMTRDINGKLFLPKYALSQDVCTYRDFIYRTVEIPGCPLHVAPYFSYPVALSCKCGKCNTDYSDCIHEAIKTNYCTKPQKSYGGGGSGGGGSGGGGSGGGGSAPDVQDCPECTLQENPFFSQPGPILQCMGCCFSRAYPTPLRSKKTMLVQKNVTSESTCCVAKSYNRVTVMGGFKVENHTACHCSTCYYHKSGGGGSGGGGSGGGGSGGGGSGGGGSGGGGSGMGCSSPPCECHQEEDFRVTCKDIQRIPSLPPSTQTLKLIETHLRTIPSHAFSNLPNISRIYVSIDVTLQQLESHSFYNLSKVTHIEIRNTRNLTYIDPDALKELPLLKFLGIFNTGLKMFPDLTKVYSTDIFFILEITDNPYMTSIPVNAFQGLCNETLTLKLYNNGFTSVQGYAFNGTKLDAVYLNKNKYLTVIDKDAFGGVYSGPSLLLPLGRKSLSFETQKAPSSSTP

SEQ ID NO: 9 - protein, 646 aa, Artificial
  TSH beta alpha fusion protein
FCIPTEYTMHIERRECAYCLTINTTICAGYCMTRDINGKLFLPKYALSQDVCTYRDFIYRTVEIPGCPLHVAPYFSYPVALSCKCGKCNTDYSDCIHEAIKTNYCTKPQKSYGGGGSGGGGSGGGGSGGGGSAPDVQDCPECTLQENPFFSQPGPILQCMGCCFSRAYPTPLRSKKTMLVQKNVTSESTCCVAKSYNRVTVMGGFKVENHTACHCSTCYYHKSGGGGSGGGGSGGGGSGGGGSGGGGSGGGGSGMGCSSPPCECHQEEDFRVTCKDIQRIPSLPPSTQTLKLIETHLRTIPSHAFSNLPNISRIYVSIDVTLQQLESHSFYNLSKVTHIEIRNTRNLTYIDPDALKELPLLKFLGIFNTGLKMFPDLTKVYSTDIFFILEITDNPYMTSIPVNAFQGLCNETLTLKLYNNGFTSVQGYAFNGTKLDAVYLNKNKYLTVIDKDAFGGVYSGPSLLDVSQTSVTALPSKGLEHLKELIARNTWTLKKLPLSLSFLHLTRADLSYPSHCCAFKNQKKIRGILESLMCNESSMQSLRQRKSVNALNSPLHQEYEENLGDSIVGYKEKSKFQDTHNNAHYYVFFEEQEDEIIGFGQELKNPQEETLQAFDSHYDYTICGDSEDMVCTPKSDEFNPCEDIMG

SEQ ID NO: 10 - protein, 515 aa, Artificial
  TSH alpha beta fusion protein
APDVQDCPECTLQENPFFSQPGAPILQCMGCCFSRAYPTPLRSKKTMLVQKNVTSESTCCVAKSYNRVTVMGGFKVENHTACHCSTCYYHKSGGGGSGGGGSGGGGSGGGGSFCIPTEYTMHIERRECAYCLTINTTICAGYCMTRDINGKLFLPKYALSQDVCTYRDFIYRTVEIPGCPLHVAPYFSYPVALSCKCGKCNTDYSDCIHEAIKTNYCTKPQKSYGGGGSGGGGSGGGGSGGGGSGGGGSGGGGSGGGGSGMGCSSPPCECHQEEDFRVTCKDIQRIPSLPPSTQTLKLIETHLRTIPSHAFSNLPNISRIYVSIDVTLQQLESHSFYNLSKVTHIEIRNTRNLTYIDPDALKELPLLKFLGIFNTGLKMFPDLTKVYSTDIFFILEITDNPYMTSIPVNAFQGLCNETLTLKLYNNGFTSVQGYAFNGTKLDAVYLNKNKYLTVIDKDAFGGVYSGPSLLDVSQTSVTALPSKGLEHLKELIARNTWTLKKLPLSLSFLHLTRAD

SEQ ID NO: 11 - protein, 491 aa, Artificial
  TSH alpha beta fusion protein
APDVQDCPECTLQENPFFSQPGAPILQCMGCCFSRAYPTPLRSKKTMLVQKNVTSESTCCVAKSYNRVTVMGGFKVENHTACHCSTCYYHKSGGGGSGGGGSGGGGSGGGGSFCIPTEYTMHIERRECAYCLTINTTICAGYCMTRDINGKLFLPKYALSQDVCTYRDFIYRTVEIPGCPLHVAPYFSYPVALSCKCGKCNTDYSDCIHEAIKTNYCTKPQKSYGGGGSGGGGSGGGGSGGGGSGGGGSGGGGSGGGGSGMGCSSPPCECHQEEDFRVTCKDIQRIPSLPPSTQTLKLIETHLRTIPSHAFSNLPNISRIYVSIDVTLQQLESHSFYNLSKVTHIEIRNTRNLTYIDPDALKELPLLKFLGIFNTGLKMFPDLTKVYSTDIFFILEITDNPYMTSIPVNAFQGLCNETLTLKLYNNGFTSVQGYAFNGTKLDAVYLNKNKYLTVIDKDAFGGVYSGPSLLLPLGRKSLSFETQKAPSSSTP

SEQ ID NO: 12 - protein, 651 aa, Artificial
  TSH alpha beta fusion protein
APDVQDCPECTLQENPFFSQPGAPILQCMGCCFSRAYPTPLRSKKTMLVQKNVTSESTCCVAKSYNRVTVMGGFKVENHTACHCSTCYYHKSGGGGSGGGGSGGGGSGGGGSFCIPTEYTMHIERRECAYCLTINTTICAGYCMTRDINGKLFLKYALSQDVCTYRDFIYRTVEIPGCPLHVAPYFSYPVALSCKCGKCNTDYSDCIHEAIKTNYCTKPQKSYGGGGSGGGGSGGGGSGGGGSGGGGSGGGGSGGGGSGMGCSSPPCECHQEEDFRVTCKDIQRIPSLPPSTQTLKLIETHLRTIPSHAFSNLPNISRIYVSIDVTLQQLESHSFYNLSKVTHIEIRNTRNLTYIDPDALKELPLLKFLGIFNTGLKMFPDLTKVYSTDIFFILEITDNPYMTSIPVNAFQGLCNETLTLKLYNNGFTSVQGYAFNGTKLDAVYLNKNKYLTVIDKDAFGGVYSGPSLLDVSQTSVTALPSKGLEHLKELIARNTWTLKKLPLSLSFLHLTRADLSYPSHCCAFKNQKKIRGILESLMCNESSMQSLRQRKSVNALNSPLHQEYEENLGDSIVGYKEKSKFQDTHNNAHYYVFFEEQEDEIIGFGQELKNPQEETLQAFDSHYDYTICGDSEDMVCTPKSDEFNPCEDIMG

SEQ ID NO: 13 - protein, 403 aa, Artificial
  TSH beta fusion protein
FCIPTEYTMHIERRECAYCLTINTTICAGYCMTRDINGKLFLPKYALSQDVCTYRDFIYRTVEIPGCPLHVAPYFSYPVALSCKCGKCNTDYSDCIHEAIKTNYCTKPQKSYGGGGSGGGGSGGGGSGGGGSGGGGSGGGGSGGGGSGMGCSSPPCECHQEEDFRVTCKDIQRIPSLPPSTQTLKLIETHLRTIPSHAFSNLPNISRIYVSIDVTLQQLESHSFYNLSKVTHIEIRNTRNLTYIDPDALKELPLLKFLGIFNTGLKMFPDLTKVYSTDIFFILEITDNPYMTSIPVNAFQGLCNETLTLKLYNNGFTSVQGYAFNGTKLDAVYLNKNKYLTVIDKDAFGGVYSGPSLLDVSQTSVTALPSKGLEHLKELIARNTWTLKKLPLSLSFLHLTRAD

SEQ ID NO: 14 - protein, 379 aa, Artificial
  TSH beta fusion protein
FCIPTEYTMHIERRECAYCLTINTTICAGYCMTRDINGKLFLPKYALSQDVCTYRDFIYRTVEIPGCPLHVAPYFSYPVALSCKCGKCNTDYSDCIHEAIKTNYCTKPQKSYGGGGSGGGGSGGGGSGGGGSGGGGSGGGGSGGGGSGMGCSSPPCECHQEEDFRVTCKDIQRIPSLPPSTQTLKLIETHLRTIPSHAFSNLPNISRIYVSIDVTLQQLESHSFYNLSKVTHIEIRNTRNLTYIDPDALKELPLLKFLGIFNTGLKMFPDLTKVYSTDIFFILEITDNPYMTSIPVNAFQGLCNETLTLKLYNNGFTSVQGYAFNGTKLDAVYLNKNKYLTVIDKDAFGGVYSGPSLLLPLGRKSLSFETQKAPSSSTP

SEQ ID NO: 15 - protein, 540 aa, Artificial
  TSH beta fusion protein
FCIPTEYTMHIERRECAYCLTINTTICAGYCMTRDINGKLFLPKYALSQDVCTYRDFIYRTVEIPGCPLHVAPYFSYPVALSCKCGKCNTDYSDCIHEAIKTNYCTKPQKSYGGGGSGGGGSGGGGSGGGGSGGGGSGGGGSGGGGSGMGCSSPPCECHQEEDFRVTCKDIQRIPSLPPSTQTLKLIETHLRTIPSHAFSNLPNISRIYVSIDVTLQQLESHSFYNLSKVTHIEIRNTRNLTYIDPDALKELPLLKFLGIFNTGLKMFPDLTKVYSTDIFFILEITDNPYMTSIPVNAFQGLCNETLTLKLYNNGFTSVQGYAFNGTKLDAVYLNKNKYLTVIDKDAFGGVYSGPSLLDVSQTSVTALPSKGLEHLKELIARNTWTLKKLPLSLSFLHLTRADLSYPSHCCAFKNQKKIRGILESLMCNESSMQSLRQRKSVNALNSPLHQEYEENLGDSIVGYKEKSKFQDTHNNAHYYVFFEEQEDEIIGFGQELKNPQEETLQAFDSHYDYTICGDSEDMVCTPKSDEFNPCEDIMG

SEQ ID NO: 16 - protein, 378 aa, Artificial
  TSH alpha fusion protein
APDVQDCPECTLQENPFFSQPGAPILQCMGCCFSRAYPTPLRSKKTMLVQKNVTSESTCCVAKSYNRVTVMGGFKVENHTACHCSTCYYHKSGGGGSGGGGSGGGGSGGGGSGGGGSGGGGSGMGCSSPPCECHQEEDFRVTCKDIQRIPSLPPSTQTLKLIETHLRTIPSHAFSNLPNISRIYVSIDVTLQQLESHSFYNLSKVTHIEIRNTRNLTYIDPDALKELPLLKFLGIFNTGLKMFPDLTKVYSTDIFFILEITDNPYMTSIPVNAFQGLCNETLTLKLYNNGFTSVQGYAFNGTKLDAVYLNKNKYLTVIDKDAFGGVYSGPSLLDVSQTSVTALPSKGLEHLKELIARNTWTLKKLPLSLSFLHLTRAD

SEQ ID NO: 17 - protein, 354 aa, Artificial
  TSH alpha fusion protein
APDVQDCPECTLQENPFFSQPGAPILQCMGCCFSRAYPTPLRSKKTMLVQKNVTSESTCCVAKSYNRVTVMGGFKVENHTACHCSTCYYHKSGGGGSGGGGSGGGGSGGGGSGGGGSGGGGSGMGCSSPPCECHQEEDFRVTCKDIQRIPSLPPSTQTLKLIETHLRTIPSHAFSNLPNISRIYVSIDVTLQQLESHSFYNLSKVTHIEIRNTRNLTYIDPDALKELPLLKFLGIFNTGLKMFPDLTKVYSTDIFFILEITDNPYMTSIPVNAFQGLCNETLTLKLYNNGFTSVQGYAFNGTKLDAVYLNKNKYLTVIDKDAFGGVYSGPSLLLPLGRKSLSFETQKAPSSSTP

SEQ ID NO: 18 - protein, 515 aa, Artificial
  TSH alpha fusion protein
APDVQDCPECTLQENPFFSQPGAPILQCMGCCFSRAYPTPLRSKKTMLVQKNVTSESTCCVAKSYNRVTVMGGFKVENHTACHCSTCYYHKSGGGGSGGGGSGGGGSGGGGSGGGGSGGGGSGMGCSSPPCECHQEEDFRVTCKDIQRIPSLPPSTQTLKLIETHLRTIPSHAFSNLPNISRIYVSIDVTLQQLESHSFYNLSKVTHIEIRNTRNLTYIDPDALKELPLLKFLGIFNTGLKMFPDLTKVYSTDIFFILEITDNPYMTSIPVNAFQGLCNETLTLKLYNNGFTSVQGYAFNGTKLDAVYLNKNKYLTVIDKDAFGGVYSGPSLLDVSQTSVTALPSKGLEHLKELIARNTWTLKKLPLSLSFLHLTRADLSYPSHCCAFKNQKKIRGILESLMCNESSMQSLRQRKSVNALNSPLHQEYEENLGDSIVGYKEKSKFQDTHNNAHYYVFFEEQEDEIIGFGQELKNPQEETLQAFDSHYDYTICGDSEDMVCTPKSDEFNPCEDIMG

SEQ ID NO: 19 - protein, 515 aa, Artificial
  TSH beta alpha fusion proteins
GMGCSSPPCECHQEEDFRVTCKDIQRIPSLPPSTQTLKLIETHLRTIPSHAFSNLPNISRIYVSIDVTLQQLESHSFYNLSKVTHIEIRNTRNLTYIDPDALKELPLLKFLGIFNTGLKMFPDLTKVYSTDIFFILEITDNPYMTSIPVNAFQGLCNETLTLKLYNNGFTSVQGYAFNGTKLDAVYLNKNKYLTVIDKDAFGGVYSGPSLLDVSQTSVTALPSKGLEHLKELIARNTWTLKKLPLSLSFLHLTRADGGGGSGGGGSGGGGSGGGGSGGGGSGGGGSGGGGSFCIPTEYTMHIERRECAYCLTINTTICAGYCMTRDINGKLFLPKYALSQDVCTYRDFIYRTVEIPGCPLHVAPYFSYPVALSCKCGKCNTDYSDCIHEAIKTNYCTKPQKSYGGGGSGGGGSGGGGSGGGGSAPDVQDCPECTLQENPFFSQPGAPILQCMGCCFSRAYPTPLRSKKTMLVQKNVTSESTCCVAKSYNRVTVMGGFKVENHTACHCSTCYYHKS

SEQ ID NO: 20 - protein, 491 aa, Artificial
  Receptor beta alpha fusion protein 1
GMGCSSPPCECHQEEDFRVTCKDIQRIPSLPPSTQTLKLIETHLRTIPSHAFSNLPNISRIYVSIDVTLQQLESHSFYNLSKVTHIEIRNTRNLTYIDPDALKELPLLKFLGIFNTGLKMFPDLTKVYSTDIFFILEITDNPYMTSIPVNAFQGLCNETLTLKLYNNGFTSVQGYAFNGTKLDAVYLNKNKYLTVIDKDAFGGVYSGPSLLLPLGRKSLSFETQKAPSSSTPGGGGSGGGGSGGGGSGGGGSGGGGSGGGGSGGGGSFCIPTEYTMHIERRECAYCLTINTTICAGYCMTRDINGKLFLPKYALSQDVCTYRDFIYRTVEIPGCPLHVAPYFSYPVALSCKCGKCNTDYSDCIHEAIKTNYCTKPQKSYGGGGSGGGGSGGGGSGGGGSAPDVQDCPECTLQENPFFSQPGAPILQCMGCCFSRAYPTPLRSKKTMLVQKNVTSESTCCVAKSYNRVTVMGGFKVENHTACHCSTCYYHKS

SEQ ID NO: 21 - protein, 657 aa, Artificial
  TSH beta alpha fusion protein
GMGCSSPPCECHQEEDFRVTCKDIQRIPSLPPSTQTLKLIETHLRTIPSHAFSNLPNISRIYVSIDVTLQQLESHSFYNLSKVTHIEIRNTRNLTYIDPDALKELPLLKFLGIFNTGLKMFPDLTKVYSTDIFFILEITDNPYMTSIPVNAFQGLCNETLTLKLYNNGFTSVQGYAFNGTKLDAVYLNKNKYLTVIDKDAFGGVYSGPSLLDVSQTSVTALPSKGLEHLKELIARNTWTLKKLPLSLSFLHLTRADLSYPSHCCAFKNQKKIRGILESLMCNESSMQSLRQRKSVNALNSPLHQEYEENLGDSIVGYKEKSKFQDTHNNAHYYVFFEEQEDEIIGFGQELKNPQEETLQAFDSHYDYTICGDSEDMVCTPKSDEFNPCEDIMGGGGGSGGGGSGGGGSGGGGSGGGGSGGGGSGGGGSGGGGSFCIPTEYTMHIERRECAYCLTINTTICAGYCMTRDINGKLFLPKYALSQDVCTYRDFIYRTVEIPGCPLHVAPYFSYPVALSCKCGKCNTDYSDCIHEAIKTNYCTKPQKSYGGGGSGGGGSGGGGSGGGGSAPDVQDCPECTLQENPFFSQPGAPILQCMGCCFSRAYPTPLRSKKTMLVQKNVTSESTCCVAKSYNRVTVMGGFKVENHTACHCSTCYYHKS

SEQ ID NO: 22 - protein, 515 aa, Artificial
  TSH alpha beta fusion protein
GMGCSSPPCECHQEEDFRVTCKDIQRIPSLPPSTQTLKLIETHLRTIPSHAFSNLPNISRIYVSIDVTLQQLESHSFYNLSKVTHIEIRNTRNLTYIDPDALKELPLLKFLGIFNTGLKMFPDLTKVYSTDIFFILEITDNPYMTSIPVNAFQGLCNETLTLKLYNNGFTSVQGYAFNGTKLDAVYLNKNKYLTVIDKDAFGGVYSGPSLLDVSQTSVTALPSKGLEHLKELIARNTWTLKKLPLSLSFLHLTRADGGGGSGGGGSGGGGSGGGGSGGGGSGGGGSGGGGSAPDVQDCPECTLQENPFFSQPGAPILQCMGCCFSRAYPTPLRSKKTMLVQKNVTSESTCCVAKSYNRVTVMGGFKVENHTACHCSTCYYHKSGGGGSGGGGSGGGGSGGGGSFCIPTEYTMHIERRECAYCLTINTTICAGYCMTRDINGKLFLPKYALSQDVCTYRDFIYRTVEIPGCPLHVAPYFSYPVALSCKCGKCNTDYSDCIHEAIKTNYCTKPQKSY

SEQ ID NO: 23 - protein, 491 aa, Artificial
  TSH alpha beta fusion protein
GMGCSSPPCECHQEEDFRVTCKDIQRIPSLPPSTQTLKLIETHLRTIPSHAFSNLPNISRIYVSIDVTLQQLESHSFYNLSKVTHIEIRNTRNLTYIDPDALKELPLLKFLGIFNTGLKMFPDLTKVYSTDIFFILEITDNPYMTSIPVNAFQGLCNETLTLKLYNNGFTSVQGYAFNGTKLDAVYLNKNKYLTVIDKDAFGGVYSGPSLLLPLGRKSLSFETQKAPSSSTPGGGGSGGGGSGGGGSGGGGSGGGGSGGGGSGGGGSAPDVQDCPECTLQENPFFSQPGAPILQCMGCCFSRAYPTPLRSKKTMLVQKNVTSESTCCVAKSYNRVTVMGGFKVENHTACHCSTCYYHKSGGGGSGGGGSGGGGSGGGGSFCIPTEYTMHIERRECAYCLTINTTICAGYCMTRDINGKLFLPKYALSQDVCTYRDFIYRTVEIPGCPLHVAPYFSYPVALSCKCGKCNTDYSDCIHEAIKTNYCTKPQKSY

SEQ ID NO: 24 - protein, 657 aa, Artificial
  TSH alpha beta fuson protein
GMGCSSPPCECHQEEDFRVTCKDIQRIPSLPPSTQTLKLIETHLRTIPSHAFSNLPNISRIYVSIDVTLQQLESHSFYNLSKVTHIEIRNTRNLTYIDPDALKELPLLKFLGIFNTGLKMFPDLTKVYSTDIFFILEITDNPYMTSIPVNAFQGLCNETLTLKLYNNGFTSVQGYAFNGTKLDAVYLNKNKYLTVIDKDAFGGVYSGPSLLDVSQTSVTALPSKGLEHLKELIARNTWTLKKLPLSLSFLHLTRADLSYPSHCCAFKNQKKIRGILESLMCNESSMQSLRQRKSVNALNSPLHQEYEENLGDSIVGYKEKSKFQDTHNNAHYYVFFEEQEDEIIGFGQELKNPQEETLQAFDSHYDYTICGDSEDMVCTPKSDEFNPCEDIMGGGGGSGGGGSGGGGSGGGGSGGGGSGGGGSGGGGSGGGGSAPDVQDCPECTLQENPFFSQPGAPILQCMGCCFSRAYPTPLRSKKTMLVQKNVTSESTCCVAKSYNRVTVMGGFKVENHTACHCSTCYYHKSGGGGSGGGGSGGGGSGGGGSFCIPTEYTMHIERRECAYCLTINTTICAGYCMTRDINGKLFLPKYALSQDVCTYRDFIYRTVEIPGCPLHVAPYFSYPVALSCKCGKCNTDYSDCIHEAIKTNYCTKPQKSY

SEQ ID NO: 25 - protein, 403 aa, Artificial
  TSH beta fusion  protein
GMGCSSPPCECHQEEDFRVTCKDIQRIPSLPPSTQTLKLIETHLRTIPSHAFSNLPNISRIYVSIDVTLQQLESHSFYNLSKVTHIEIRNTRNLTYIDPDALKELPLLKFLGIFNTGLKMFPDLTKVYSTDIFFILEITDNPYMTSIPVNAFQGLCNETLTLKLYNNGFTSVQGYAFNGTKLDAVYLNKNKYLTVIDKDAFGGVYSGPSLLDVSQTSVTALPSKGLEHLKELIARNTWTLKKLPLSLSFLHLTRADGGGGSGGGGSGGGGSGGGGSGGGGSGGGGSGGGGSFCIPTEYTMHIERRECAYCLTINTTICAGYCMTRDINGKLFLPKYALSQDVCTYRDFIYRTVEIPGCPLHVAPYFSYPVALSCKCGKCNTDYSDCIHEAIKTNYCTKPQKSY

SEQ ID NO: 26 - protein, 379 aa, Artificial
  TSH beta fusion protein
GMGCSSPPCECHQEEDFRVTCKDIQRIPSLPPSTQTLKLIETHLRTIPSHAFSNLPNISRIYVSIDVTLQQLESHSFYNLSKVTHIEIRNTRNLTYIDPDALKELPLLKFLGIFNTGLKMFPDLTKVYSTDIFFILEITDNPYMTSIPVNAFQGLCNETLTLKLYNNGFTSVQGYAFNGTKLDAVYLNKNKYLTVIDKDAFGGVYSGPSLLLPLGRKSLSFETQKAPSSSTPGGGGSGGGGSGGGGSGGGGSGGGGSGGGGSGGGGSFCIPTEYTMHIERRECAYCLTINTTICAGYCMTRDINGKLFLPKYALSQDVCTYRDFIYRTVEIPGCPLHVAPYFSYPVALSCKCGKCNTDYSDCIHEAIKTNYCTKPQKSY

SEQ ID NO: 27 - protein, 545 aa, Artificial
  TSH beta fusion protein
GMGCSSPPCECHQEEDFRVTCKDIQRIPSLPPSTQTLKLIETHLRTIPSHAFSNLPNISRIYVSIDVTLQQLESHSFYNLSKVTHIEIRNTRNLTYIDPDALKELPLLKFLGIFNTGLKMFPDLTKVYSTDIFFILEITDNPYMTSIPVNAFQGLCNETLTLKLYNNGFTSVQGYAFNGTKLDAVYLNKNKYLTVIDKDAFGGVYSGPSLLDVSQTSVTALPSKGLEHLKELIARNTWTLKKLPLSLSFLHLTRADLSYPSHCCAFKNQKKIRGILESLMCNESSMQSLRQRKSVNALNSPLHQEYEENLGDSIVGYKEKSKFQDTHNNAHYYVFFEEQEDEIIGFGQELKNPQEETLQAFDSHYDYTICGDSEDMVCTPKSDEFNPCEDIMGGGGGSGGGGSGGGGSGGGGSGGGGSGGGGSGGGGSGGGGSFCIPTEYTMHIERRECAYCLTINTTICAGYCMTRDINGKLFLPKYALSQDVCTYRDFIYRTVEIPGCPLHVAPYFSYPVALSCKCGKCNTDYSDCIHEAIKTNYCTKPQKSY

SEQ ID NO: 28 - protein, 383 aa, Artificial
  TSH alpha fusion protein
GMGCSSPPCECHQEEDFRVTCKDIQRIPSLPPSTQTLKLIETHLRTIPSHAFSNLPNISRIYVSIDVTLQQLESHSFYNLSKVTHIEIRNTRNLTYIDPDALKELPLLKFLGIFNTGLKMFPDLTKVYSTDIFFILEITDNPYMTSIPVNAFQGLCNETLTLKLYNNGFTSVQGYAFNGTKLDAVYLNKNKYLTVIDKDAFGGVYSGPSLLDVSQTSVTALPSKGLEHLKELIARNTWTLKKLPLSLSFLHLTRADGGGGSGGGGSGGGGSGGGGSGGGGSGGGGSGGGGSAPDVQDCPECTLQENPFFSQPGAPILQCMGCCFSRAYPTPLRSKKTMLVQKNVTSESTCCVAKSYNRVTVMGGFKVENHTACHCSTCYYHKS

SEQ ID NO: 29 - protein, 359 aa, Artificial
  TSH alpha fusion protein
GMGCSSPPCECHQEEDFRVTCKDIQRIPSLPPSTQTLKLIETHLRTIPSHAFSNLPNISRIYVSIDVTLQQLESHSFYNLSKVTHIEIRNTRNLTYIDPDALKELPLLKFLGIFNTGLKMFPDLTKVYSTDIFFILEITDNPYMTSIPVNAFQGLCNETLTLKLYNNGFTSVQGYAFNGTKLDAVYLNKNKYLTVIDKDAFGGVYSGPSLLLPLGRKSLSFETQKAPSSSTPGGGGSGGGGSGGGGSGGGGSGGGGSGGGGSGGGGSAPDVQDCPECTLQENPFFSQPGAPILQCMGCCFSRAYPTPLRSKKTMLVQKNVTSESTCCVAKSYNRVTVMGGFKVENHTACHCSTCYYHKS

SEQ ID NO: 30 - protein, 525 aa, Artificial
  TSH alpha fusion protein
GMGCSSPPCECHQEEDFRVTCKDIQRIPSLPPSTQTLKLIETHLRTIPSHAFSNLPNISRIYVSIDVTLQQLESHSFYNLSKVTHIEIRNTRNLTYIDPDALKELPLLKFLGIFNTGLKMFPDLTKVYSTDIFFILEITDNPYMTSIPVNAFQGLCNETLTLKLYNNGFTSVQGYAFNGTKLDAVYLNKNKYLTVIDKDAFGGVYSGPSLLDVSQTSVTALPSKGLEHLKELIARNTWTLKKLPLSLSFLHLTRADLSYPSHCCAFKNQKKIRGILESLMCNESSMQSLRQRKSVNALNSPLHQEYEENLGDSIVGYKEKSKFQDTHNNAHYYVFFEEQEDEIIGFGQELKNPQEETLQAFDSHYDYTICGDSEDMVCTPKSDEFNPCEDIMGGGGGSGGGGSGGGGSGGGGSGGGGSGGGGSGGGGSGGGGSAPDVQDCPECTLQENPFFSQPGAPILQCMGCCFSRAYPTPLRSKKTMLVQKNVTSESTCCVAKSYNRVTVMGGFKVENHTACHCSTCYYHKS

SEQ ID NO: 31 - protein, 524 aa, Artificial
  TSH alpha beta fusion protein
APDVQDCPECTLQENPFFSQPGAPILQCMGCCFSRAYPTPLRSKKTMLVQKNVTSESTCCVAKSYNRVTVMGGFKVENHTACHCSTCYYHKSGGGGSGGGGSGGGGSGGGGSGGGGSGGGGSGMGCSSPPCECHQEEDFRVTCKDIQRIPSLPPSTQTLKLIETHLRTIPSHAFSNLPNISRIYVSIDVTLQQLESHSFYNLSKVTHIEIRNTRNLTYIDPDALKELPLLKFLGIFNTGLKMFPDLTKVYSTDIFFILEITDNPYMTSIPVNAFQGLCNETLTLKLYNNGFTSVQGYAFNGTKLDAVYLNKNKYLTVIDKDAFGGVYSGPSLLDVSQTSVTALPSKGLEHLKELIARNTWTLKKLPLSLSFLHLTRADGGGGSGGGGSGGGGSGGGSGGGGSGGGGSGGGGSFCIPTEYTMHIERRECAYCLTINTTICAGYCMTRDINGKLFLPKYALSQDVCTYRDFIYRTVEIPGCPLHVAPYFSYPVALSCKCGKCNTDYSDCIHEAIKTNYCTKPQKSY

SEQ ID NO: 32 - protein, 525 aa, Artificial
  TSH alpha beta fusion protein
APDVQDCPECTLQENPFFSQPGAPILQCMGCCFSRAYPTPLRSKKTMLVQKNVTSESTCCVAKSYNRVTVMGGFKVENHTACHCSTCYYHKSGGGGSGGGGSGGGGSGGGGSGGGGSGGGGSGMGCSSPPCECHQEEDFRVTCKDIQRIPSLPPSTQTLKLIETHLRTIPSHAFSNLPNISRIYVSIDVTLQQLESHSFYNLSKVTHIEIRNTRNLTYIDPDALKELPLLKFLGIFNTGLKMFPDLTKVYSTDIFFILEITDNPYMTSIPVNAFQGLCNETLTLKLYNNGFTSVQGYAFNGTKLDAVYLNKNKYLTVIDKDAFGGVYSGPSLLDVSQTSVTALPSKGLEHLKELIARNTWTLKKLPLSLSFLHLTRADGGGGSGGGGSGGGGSGGGGSGGGGSGGGGSGGGGSFCIPTEYTMHIERRECAYCLTINTTICAGYCMTRDINGKLFLPKYALSQDVCTYRDFIYRTVEIPGCPLHVAPYFSYPVALSCKCGKCNTDYSDCIHEAIKTNYCTKPQKSY

SEQ ID NO: 33 - protein, 501 aa, Artificial
  TSH alpha beta fusion protein
APDVQDCPECTLQENPFFSQPGAPILQCMGCCFSRAYPTPLRSKKTMLVQKNVTSESTCCVAKSYNRVTVMGGFKVENHTACHCSTCYYHKSGGGGSGGGGSGGGGSGGGGSGGGGSGGGGSGMGCSSPPCECHQEEDFRVTCKDIQRIPSLPPSTQTLKLIETHLRTIPSHAFSNLPNISRIYVSIDVTLQQLESHSFYNLSKVTHIEIRNTRNLTYIDPDALKELPLLKFLGIFNTGLKMFPDLTKVYSTDIFFILEITDNPYMTSIPVNAFQGLCNETLTLKLYNNGFTSVQGYAFNGTKLDAVYLNKNKYLTVIDKDAFGGVYSGPSLLLPLGRKSLSFETQKAPSSSTPGGGGSGGGGSGGGGSGGGGSGGGGSGGGGSGGGGSFCIPTEYTMHIERRECAYCLTINTTICAGYCMTRDINGKLFLPKYALSQDVCTYRDFIYRTVEIPGCPLHVAPYFSYPVALSCKCGKCNTDYSDCIHEAIKTNYCTKPQKSY

SEQ ID NO: 34 - protein, 667 aa, Artificial
  TSH alpha beta fusion protein
APDVQDCPECTLQENPFFSQPGAPILQCMGCCFSRAYPTPLRSKKTMLVQKNVTSESTCCVAKSYNRVTVMGGFKVENHTACHCSTCYYHKSGGGGSGGGGSGGGGSGGGGSGGGGSGGGGSGMGCSSPPCECHQEEDFRVTCKDIQRIPSLPPSTQTLKLIETHLRTIPSHAFSNLPNISRIYVSIDVTLQQLESHSFYNLSKVTHIEIRNTRNLTYIDPDALKELPLLKFLGIFNTGLKMFPDLTKVYSTDIFFILEITDNPYMTSIPVNAFQGLCNETLTLKLYNNGFTSVQGYAFNGTKLDAVYLNKNKYLTVIDKDAFGGVYSGPSLLDVSQTSVTALPSKGLEHLKELIARNTWTLKKLPLSLSFLHLTRADLSYPSHCCAFKNQKKIRGILESLMCNESSMQSLRQRKSVNALNSPLHQEYEENLGDSIVGYKEKSKFQDTHNNAHYYVFFEEQEDEIIGFGQELKNPQEETLQAFDSHYDYTICGDSEDMVCTPKSDEFNPCEDIMGGGGGSGGGGSGGGGSGGGGSGGGGSGGGGSGGGGSGGGGSFCIPTEYTMHIERRECAYCLTINTTICAGYCMTRDINGKLFLPKYALSQDVCTYRDFIYRTVEIPGCPLHVAPYFSYPVALSCKCGKCNTDYSDCIHEAIKTNYCTKPQKSY

SEQ ID NO: 35 - protein, 530 aa, Artificial
  TSH beta alpha fusion protein
FCIPTEYTMHIERRECAYCLTINTTICAGYCMTRDINGKLFLPKYALSQDVCTYRDFIYRTVEIPGCPLHVAPYFSYPVALSCKCGKCNTDYSDCIHEAIKTNYCTKPQKSYGGGGSGGGGSGGGGSGGGGSGGGGSGGGGSGGGGSGMGCSSPPCECHQEEDFRVTCKDIQRIPSLPPSTQTLKLIETHLRTIPSHAFSNLPNISRIYVSIDVTLQQLESHSFYNLSKVTHIEIRNTRNLTYIDPDALKELPLLKFLGIFNTGLKMFPDLTKVYSTDIFFILEITDNPYMTSIPVNAFQGLCNETLTLKLYNNGFTSVQGYAFNGTKLDAVYLNKNKYLTVIDKDAFGGVYSGPSLLDVSQTSVTALPSKGLEHLKELIARNTWTLKKLPLSLSFLHLTRADGGGGSGGGGSGGGGSGGGGSGGGGSGGGGSGGGGSAPDVQDCPECTLQENPFFSQPGAPILQCMGCCFSRAYPTPLRSKKTMLVQKNVTSESTCCVAKSYNRVTVMGGFKVENHTACHCSTCYYHKS

SEQ ID NO: 36 - protein, 506 aa, Artificial
  TSH beta alpha fusion protein
FCIPTEYTMHIERRECAYCLTINTTICAGYCMTRDINGKLFLPKYALSQDVCTYRDFIYRTVEIPGCPLHVAPYFSYPVALSCKCGKCNTDYSDCIHEAIKTNYCTKPQKSYGGGGSGGGGSGGGGSGGGGSGGGGSGGGGSGGGGSGMGCSSPPCECHQEEDFRVTCKDIQRIPSLPPSTQTLKLIETHLRTIPSHAFSNLPNISRIYVSIDVTLQQLESHSFYNLSKVTHIEIRNTRNLTYIDPDALKELPLLKFLGIFNTGLKMFPDLTKVYSTDIFFILEITDNPYMTSIPVNAFQGLCNETLTLKLYNNGFTSVQGYAFNGTKLDAVYLNKNKYLTVIDKDAFGGVYSGPSLLLPLGRKSLSFETQKAPSSSTPGGGGSGGGGSGGGGSGGGGSGGGGSGGGGSGGGGSAPDVQDCPECTLQENPFFSQPGAPILQCMGCCFSRAYPTPLRSKKTMLVQKNVTSESTCCVAKSYNRVTVMGGFKVENHTACHCSTCYYHKS

SEQ ID NO: 37 - protein, 671 aa, Artificial
  TSH beta alpha fusion protein
FCIPTEYTMHIERRECAYCLTINTTICAGYCMTRDINGKLFLPKYALSQDVCTYRDFIYRTVEIPGCPLHVAPYFSYPVALSCKCGKCNTDYSDCIHEAIKTNYCTKPQKSYGGGGSGGGGSGGGGSGGGGSGGGGSGGGGSGGGGSGMGCSSPPCECHQEEDFRVTCKDIQRIPSLPPSTQTLKLIETHLRTIPSHAFSNLPNISRIYVSIDVTLQQLESHSFYNLSKVTHIEIRNTRNLTYIDPDALKELPLLKFLGIFNTGLKMFPDLTKVYSTDIFFILEITDNPYMTSIPVNAFQGLCNETLTLKLYNNGFTSVQGYAFNGTKLDAVYLNKNKYLTVIDKDAFGGVYSGPSLLDVSQTSVTALPSKGLEHLKELIARNTWTLKKLPLSLSFLHLTRADLSYPSHCCAFKNQKKIRGILESLMCNESSMQSLRQRKSVNALNSPLHQEYEENLGDSIVGYKEKSKFQDTHNNAHYYVFFEEQEDEIIGFGQELKNPQEETLQAFDSHYDYTICGDSEDMVCTPKSDEFNPCEDIMGGGGGSGGGGSGGGGSGGGGSGGGGSGGGGSGGGGSGGGSAPDVQDCPECTLQENPFFSQPGAPILQCMGCCFSRAYPTPLRSKKTMLVQKNVTSESTCCVAKSYNRVTVMGGFKVENHTACHCSTCYYHKS

SEQ ID NO: 38 - protein, 671 aa, Artificial; identical to SEQ ID NO: 37
  TSH beta alpha fusion protein

SEQ ID NO: 39 - protein, 510 aa, Artificial
  TSH beta alpha fusion protein
FCIPTEYTMHIERRECAYCLTINTTICAGYCMTRDINGKLFLPKYALSQDVCTYRDFIYRTVEIPGCPLHVAPYFSYPVALSCKCGKCNTDYSDCIHEAIKTNYCTKPQKSYGGGGSGGGGSGGNGSGGGGSAPDVQDCPECTLQENPFFSQPGAPILQCMGCCFSRAYPTPLRSKKTMLVQKNVTSESTCCVAKSYNRVTVMGGFKVENHTACHCSTCYYHKSGGGGSGGGGSGGGGSGGNGSGGGGSGGGGSGMGCSSPPCECHQEEDFRVTCKDIQRIPSLPPSTQTLKLIETHLRTIPSHAFSNLPNISRIYVSIDVTLQQLESHSFYNLSKVTHIEIRNTRNLTYIDPDALKELPLLKFLGIFNTGLKMFPDLTKVYSTDIFFILEITDNPYMTSIPVNAFQGLCNETLTLKLYNNGFTSVQGYAFNGTKLDAVYLNKNKYLTVIDKDAFGGVYSGPSLLDVSQTSVTALPSKGLEHLKELIARNTWTLKKLPLSLSFLHLTRAD

SEQ ID NO: 40 - protein, 485 aa, Artificial
  TSH beta alpha receptor fusion protein
FCIPTEYTMHIERRECAYCLTINTTICAGYCMTRDINGKLFLPKYALSQDVCTYRDFIYRTVEIPGCPLHVAPYFSYPVALSCKCGKCNTDYSDCIHEAIKTNYCTKPQKSYGGGGSGGGGSGGNGSGGGGSAPDVQDCPECTLQENPFFSQPGPILQCMGCCFSRAYPTPLRSKKTMLVQKNVTSESTCCVAKSYNRVTVMGGFKVENHTACHCSTCYYHKSGGGGSGGGGSGGGGSGGNGSGGGGSGGGGSGMGCSSPPCECHQEEDFRVTCKDIQRIPSLPPSTQTLKLIETHLRTIPSHAFSNLPNISRIYVSIDVTLQQLESHSFYNLSKVTHIEIRNTRNLTYIDPDALKELPLLKFLGIFNTGLKMFPDLTKVYSTDIFFILEITDNPYMTSIPVNAFQGLCNETLTLKLYNNGFTSVQGYAFNGTKLDAVYLNKNKYLTVIDKDAFGGVYSGPSLLLPLGRKSLSFETQKAPSSSTP

SEQ ID NO: 41 - protein, 646 aa, Artificial
  beta alpha receptor fusion 3
FCIPTEYTMHIERRECAYCLTINTTICAGYCMTRDINGKLFLPKYALSQDVCTYRDFIYRTVEIPGCPLHVAPYFSYPVALSCKCGKCNTDYSDCIHEAIKTNYCTKPQKSYGGGGSGGGGSGGNGSGGGGSAPDVQDCPECTLQENPFFSQPGPILQCMGCCFSRAYPTPLRSKKTMLVQKNVTSESTCCVAKSYNRVTVMGGFKVENHTACHCSTCYYHKSGGGGSGGGGSGGGGSGGNGSGGGGSGGGGSGMGCSSPPCECHQEEDFRVTCKDIQRIPSLPPSTQTLKLIETHLRTIPSHAFSNLPNISRIYVSIDVTLQQLESHSFYNLSKVTHIEIRNTRNLTYIDPDALKELPLLKFLGIFNTGLKMFPDLTKVYSTDIFFILEITDNPYMTSIPVNAFQGLCNETLTLKLYNNGFTSVQGYAFNGTKLDAVYLNKNKYLTVIDKDAFGGVYSGPSLLDVSQTSVTALPSKGLEHLKELIARNTWTLKKLPLSLSFLHLTRADLSYPSHCCAFKNQKKIRGILESLMCNESSMQSLRQRKSVNALNSPLHQEYEENLGDSIVGYKEKSKFQDTHNNAHYYVFFEEQEDEIIGFGQELKNPQEETLQAFDSHYDYTICGDSEDMVCTPKSDEFNPCEDIMG

SEQ ID NO: 42 - protein, 515 aa, Artificial
  TSH alpha beta fusion protein
APDVQDCPECTLQENPFFSQPGAPILQCMGCCFSRAYPTPLRSKKTMLVQKNVTSESTCCVAKSYNRVTVMGGFKVENHTACHCSTCYYHKSGGGGSGGGGSGGNGSGGGGSFCIPTEYTMHIERRECAYCLTINTTICAGYCMTRDINGKLFLPKYALSQDVCTYRDFIYRTVEIPGCPLHVAPYFSYPVALSCKCGKCNTDYSDCIHEAIKTNYCTKPQKSYGGGGSGGGGSGGGGSGGGGSGGNGSGGGGSGGGGSGMGCSSPPCECHQEEDFRVTCKDIQRIPSLPPSTQTLKLIETHLRTIPSHAFSNLPNISRIYVSIDVTLQQLESHSFYNLSKVTHIEIRNTRNLTYIDPDALKELPLLKFLGIFNTGLKMFPDLTKVYSTDIFFILEITDNPYMTSIPVNAFQGLCNETLTLKLYNNGFTSVQGYAFNGTKLDAVYLNKNKYLTVIDKDAFGGVYSGPSLLDVSQTSVTALPSKGLEHLKELIARNTWTLKKLPLSLSFLHLTRAD

SEQ ID NO: 43 - protein, 491 aa, Artificial
  TSH alpha beta fusion protein
APDVQDCPECTLQENPFFSQPGAPILQCMGCCFSRAYPTPLRSKKTMLVQKNVTSESTCCVAKSYNRVTVMGGFKVENHTACHCSTCYYHKSGGGGSGGGGSGGNGSGGGGSFCIPTEYTMHIERRECAYCLTINTTICAGYCMTRDINGKLFLPKYALSQDVCTYRDFIYRTVEIPGCPLHVAPYFSYPVALSCKCGKCNTDYSDCIHEAIKTNYCTKPQKSYGGGGSGGGGSGGGGSGGGGSGGNGSGGGGSGGGGSGMGCSSPPCECHQEEDFRVTCKDIQRIPSLPPSTQTLKLIETHLRTIPSHAFSNLPNISRIYVSIDVTLQQLESHSFYNLSKVTHIEIRNTRNLTYIDPDALKELPLLKFLGIFNTGLKMFPDLTKVYSTDIFFILEITDNPYMTSIPVNAFQGLCNETLTLKLYNNGFTSVQGYAFNGTKLDAVYLNKNKYLTVIDKDAFGGVYSGPSLLLPLGRKSLSFETQKAPSSSTP

SEQ ID NO: 44 - protein, 651 aa, Artificial
  TSH alpha beta fusion 3
APDVQDCPECTLQENPFFSQPGAPILQCMGCCFSRAYPTPLRSKKTMLVQKNVTSESTCCVAKSYNRVTVMGGFKVENHTACHCSTCYYHKSGGGGSGGGGSGGNGSGGGGSFCIPTEYTMHIERRECAYCLTINTTICAGYCMTRDINGKLFLKYALSQDVCTYRDFIYRTVEIPGCPLHVAPYFSYPVALSCKCGKCNTDYSDCIHEAIKTNYCTKPQKSYGGGGSGGGGSGGGGSGGGGSGGNGSGGGGSGGGGSGMGCSSPPCECHQEEDFRVTCKDIQRIPSLPPSTQTLKLIETHLRTIPSHAFSNLPNISRIYVSIDVTLQQLESHSFYNLSKVTHIEIRNTRNLTYIDPDALKELPLLKFLGIFNTGLKMFPDLTKVYSTDIFFILEITDNPYMTSIPVNAFQGLCNETLTLKLYNNGFTSVQGYAFNGTKLDAVYLNKNKYLTVIDKDAFGGVYSGPSLLDVSQTSVTALPSKGLEHLKELIARNTWTLKKLPLSLSFLHLTRADLSYPSHCCAFKNQKKIRGILESLMCNESSMQSLRQRKSVNALNSPLHQEYEENLGDSIVGYKEKSKFQDTHNNAHYYVFFEEQEDEIIGFGQELKNPQEETLQAFDSHYDYTICGDSEDMVCTPKSDEFNPCEDIMG

SEQ ID NO: 45 - protein, 403 aa, Artificial
  TSH beta fusion protein
FCIPTEYTMHIERRECAYCLTINTTICAGYCMTRDINGKLFLPKYALSQDVCTYRDFIYRTVEIPGCPLHVAPYFSYPVALSCKCGKCNTDYSDCIHEAIKTNYCTKPQKSYGGGGSGGGGSGGGGSGGGGSGGNGSGGGGSGGGGSGMGCSSPPCECHQEEDFRVTCKDIQRIPSLPPSTQTLKLIETHLRTIPSHAFSNLPNISRIYVSIDVTLQQLESHSFYNLSKVTHIEIRNTRNLTYIDPDALKELPLLKFLGIFNTGLKMFPDLTKVYSTDIFFILEITDNPYMTSIPVNAFQGLCNETLTLKLYNNGFTSVQGYAFNGTKLDAVYLNKNKYLTVIDKDAFGGVYSGPSLLDVSQTSVTALPSKGLEHLKELIARNTWTLKKLPLSLSFLHLTRAD

SEQ ID NO: 46 - protein, 379 aa, Artificial
  TSH beta fusion protein
FCIPTEYTMHIERRECAYCLTINTTICAGYCMTRDINGKLFLPKYALSQDVCTYRDFIYRTVEIPGCPLHVAPYFSYPVALSCKCGKCNTDYSDCIHEAIKTNYCTKPQKSYGGGGSGGGGSGGGGSGGGGSGGNGSGGGGSGGGGSGMGCSSPPCECHQEEDFRVTCKDIQRIPSLPPSTQTLKLIETHLRTIPSHAFSNLPNISRIYVSIDVTLQQLESHSFYNLSKVTHIEIRNTRNLTYIDPDALKELPLLKFLGIFNTGLKMFPDLTKVYSTDIFFILEITDNPYMTSIPVNAFQGLCNETLTLKLYNNGFTSVQGYAFNGTKLDAVYLNKNKYLTVIDKDAFGGVYSGPSLLLPLGRKSLSFETQKAPSSSTP

SEQ ID NO: 47 - protein, 540 aa, Artificial
  TSH beta fusion protein
FCIPTEYTMHIERRECAYCLTINTTICAGYCMTRDINGKLFLPKYALSQDVCTYRDFIYRTVEIPGCPLHVAPYFSYPVALSCKCGKCNTDYSDCIHEAIKTNYCTKPQKSYGGGGSGGGGSGGGGSGGGGSGGNGSGGGGSGGGGSGMGCSSPPCECHQEEDFRVTCKDIQRIPSLPPSTQTLKLIETHLRTIPSHAFSNLPNISRIYVSIDVTLQQLESHSFYNLSKVTHIEIRNTRNLTYIDPDALKELPLLKFLGIFNTGLKMFPDLTKVYSTDIFFILEITDNPYMTSIPVNAFQGLCNETLTLKLYNNGFTSVQGYAFNGTKLDAVYLNKNKYLTVIDKDAFGGVYSGPSLLDVSQTSVTALPSKGLEHLKELIARNTWTLKKLPLSLSFLHLTRADLSYPSHCCAFKNQKKIRGILESLMCNESSMQSLRQRKSVNALNSPLHQEYEENLGDSIVGYKEKSKFQDTHNNAHYYVFFEEQEDEIIGFGQELKNPQEETLQAFDSHYDYTICGDSEDMVCTPKSDEFNPCEDIMG

SEQ ID NO: 48 - protein, 378 aa, Artificial
  TSH alpha fusion protein
APDVQDCPECTLQENPFFSQPGAPILQCMGCCFSRAYPTPLRSKKTMLVQKNVTSESTCCVAKSYNRVTVMGGFKVENHTACHCSTCYYHKSGGGGSGGGGSGGGGSGGGGSGGNGSGGGGSGMGCSSPPCECHQEEDFRVTCKDIQRIPSLPPSTQTLKLIETHLRTIPSHAFSNLPNISRIYVSIDVTLQQLESHSFYNLSKVTHIEIRNTRNLTYIDPDALKELPLLKFLGIFNTGLKMFPDLTKVYSTDIFFILEITDNPYMTSIPVNAFQGLCNETLTLKLYNNGFTSVQGYAFNGTKLDAVYLNKNKYLTVIDKDAFGGVYSGPSLLDVSQTSVTALPSKGLEHLKELIARNTWTLKKLPLSLSFLHLTRAD

SEQ ID NO: 49 - protein, 354 aa, Artificial
  TSH alpha fusion protein
APDVQDCPECTLQENPFFSQPGAPILQCMGCCFSRAYPTPLRSKKTMLVQKNVTSESTCCVAKSYNRVTVMGGFKVENHTACHCSTCYYHKSGGGGSGGGGSGGGGSGGGGSGGNGSGGGGSGMGCSSPPCECHQEEDFRVTCKDIQRIPSLPPSTQTLKLIETHLRTIPSHAFSNLPNISRIYVSIDVTLQQLESHSFYNLSKVTHIEIRNTRNLTYIDPDALKELPLLKFLGIFNTGLKMFPDLTKVYSTDIFFILEITDNPYMTSIPVNAFQGLCNETLTLKLYNNGFTSVQGYAFNGTKLDAVYLNKNKYLTVIDKDAFGGVYSGPSLLLPLGRKSLSFETQKAPSSSTP

SEQ ID NO: 50 - protein, 515 aa, Artificial
  TSH alpha fusion protein
APDVQDCPECTLQENPFFSQPGAPILQCMGCCFSRAYPTPLRSKKTMLVQKNVTSESTCCVAKSYNRVTVMGGFKVENHTACHCSTCYYHKSGGGGSGGGGSGGGGSGGGGSGGNGSGGGGSGMGCSSPPCECHQEEDFRVTCKDIQRIPSLPPSTQTLKLIETHLRTIPSHAFSNLPNISRIYVSIDVTLQQLESHSFYNLSKVTHIEIRNTRNLTYIDPDALKELPLLKFLGIFNTGLKMFPDLTKVYSTDIFFILEITDNPYMTSIPVNAFQGLCNETLTLKLYNNGFTSVQGYAFNGTKLDAVYLNKNKYLTVIDKDAFGGVYSGPSLLDVSQTSVTALPSKGLEHLKELIARNTWTLKKLPLSLSFLHLTRADLSYPSHCCAFKNQKKIRGILESLMCNESSMQSLRQRKSVNALNSPLHQEYEENLGDSIVGYKEKSKFQDTHNNAHYYVFFEEQEDEIIGFGQELKNPQEETLQAFDSHYDYTICGDSEDMVCTPKSDEFNPCEDIMG

SEQ ID NO: 51 - protein, 515 aa, Artificial
  TSH beta alpha fusion protein
GMGCSSPPCECHQEEDFRVTCKDIQRIPSLPPSTQTLKLIETHLRTIPSHAFSNLPNISRIYVSIDVTLQQLESHSFYNLSKVTHIEIRNTRNLTYIDPDALKELPLLKFLGIFNTGLKMFPDLTKVYSTDIFFILEITDNPYMTSIPVNAFQGLCNETLTLKLYNNGFTSVQGYAFNGTKLDAVYLNKNKYLTVIDKDAFGGVYSGPSLLDVSQTSVTALPSKGLEHLKELIARNTWTLKKLPLSLSFLHLTRADGGGGSGGGGSGGNGSGGGGSGGGGSGGGGSGGGGSFCIPTEYTMHIERRECAYCLTINTTICAGYCMTRDINGKLFLPKYALSQDVCTYRDFIYRTVEIPGCPLHVAPYFSYPVALSCKCGKCNTDYSDCIHEAIKTNYCTKPQKSYGGGGSGGGGSGGNGSGGGGSAPDVQDCPECTLQENPFFSQPGAPILQCMGCCFSRAYPTPLRSKKTMLVQKNVTSESTCCVAKSYNRVTVMGGFKVENHTACHCSTCYYHKS

SEQ ID NO: 52 - protein, 491 aa, Artificial
  TSH beta alpha fusion protein
GMGCSSPPCECHQEEDFRVTCKDIQRIPSLPPSTQTLKLIETHLRTIPSHAFSNLPNISRIYVSIDVTLQQLESHSFYNLSKVTHIEIRNTRNLTYIDPDALKELPLLKFLGIFNTGLKMFPDLTKVYSTDIFFILEITDNPYMTSIPVNAFQGLCNETLTLKLYNNGFTSVQGYAFNGTKLDAVYLNKNKYLTVIDKDAFGGVYSGPSLLLPLGRKSLSFETQKAPSSSTPGGGGSGGGGSGGNGSGGGGSGGGGSGGGGSGGGGSFCIPTEYTMHIERRECAYCLTINTTICAGYCMTRDINGKLFLPKYALSQDVCTYRDFIYRTVEIPGCPLHVAPYFSYPVALSCKCGKCNTDYSDCIHEAIKTNYCTKPQKSYGGGGSGGGGSGGNGSGGGGSAPDVQDCPECTLQENPFFSQPGAPILQCMGCCFSRAYPTPLRSKKTMLVQKNVTSESTCCVAKSYNRVTVMGGFKVENHTACHCSTCYYHKS

SEQ ID NO: 53 - protein, 657 aa, Artificial
  TSH beta alpha fusion protein
GMGCSSPPCECHQEEDFRVTCKDIQRIPSLPPSTQTLKLIETHLRTIPSHAFSNLPNISRIYVSIDVTLQQLESHSFYNLSKVTHIEIRNTRNLTYIDPDALKELPLLKFLGIFNTGLKMFPDLTKVYSTDIFFILEITDNPYMTSIPVNAFQGLCNETLTLKLYNNGFTSVQGYAFNGTKLDAVYLNKNKYLTVIDKDAFGGVYSGPSLLDVSQTSVTALPSKGLEHLKELIARNTWTLKKLPLSLSFLHLTRADLSYPSHCCAFKNQKKIRGILESLMCNESSMQSLRQRKSVNALNSPLHQEYEENLGDSIVGYKEKSKFQDTHNNAHYYVFFEEQEDEIIGFGQELKNPQEETLQAFDSHYDYTICGDSEDMVCTPKSDEFNPCEDIMGGGGGSGGGGSGGGGSGGGGSGGGGSGGNGSGGGGSGGGGSFCIPTEYTMHIERRECAYCLTINTTICAGYCMTRDINGKLFLPKYALSQDVCTYRDFIYRTVEIPGCPLHVAPYFSYPVALSCKCGKCNTDYSDCIHEAIKTNYCTKPQKSYGGGGSGGGGSGGNGSGGGGSAPDVQDCPECTLQENPFFSQPGAPILQCMGCCFSRAYPTPLRSKKTMLVQKNVTSESTCCVAKSYNRVTVMGGFKVENHTACHCSTCYYHKS

SEQ ID NO: 54 - protein, 515 aa, Artificial
  TSH alpha beta fusion protein
GMGCSSPPCECHQEEDFRVTCKDIQRIPSLPPSTQTLKLIETHLRTIPSHAFSNLPNISRIYVSIDVTLQQLESHSFYNLSKVTHIEIRNTRNLTYIDPDALKELPLLKFLGIFNTGLKMFPDLTKVYSTDIFFILEITDNPYMTSIPVNAFQGLCNETLTLKLYNNGFTSVQGYAFNGTKLDAVYLNKNKYLTVIDKDAFGGVYSGPSLLDVSQTSVTALPSKGLEHLKELIARNTWTLKKLPLSLSFLHLTRADGGGGSGGGGSGGNGSGGGGSGGGGSGGGGSGGGGSAPDVQDCPECTLQENPFFSQPGAPILQCMGCCFSRAYPTPLRSKKTMLVQKNVTSESTCCVAKSYNRVTVMGGFKVENHTACHCSTCYYHKSGGGGSGGGGSGGNGSGGGGSFCIPTEYTMHIERRECAYCLTINTTICAGYCMTRDINGKLFLPKYALSQDVCTYRDFIYRTVEIPGCPLHVAPYFSYPVALSCKCGKCNTDYSDCIHEAIKTNYCTKPQKSY

SEQ ID NO: 55 - protein, 491 aa, Artificial
  TSH alpha beta fusion protein
GMGCSSPPCECHQEEDFRVTCKDIQRIPSLPPSTQTLKLIETHLRTIPSHAFSNLPNISRIYVSIDVTLQQLESHSFYNLSKVTHIEIRNTRNLTYIDPDALKELPLLKFLGIFNTGLKMFPDLTKVYSTDIFFILEITDNPYMTSIPVNAFQGLCNETLTLKLYNNGFTSVQGYAFNGTKLDAVYLNKNKYLTVIDKDAFGGVYSGPSLLLPLGRKSLSFETQKAPSSSTPGGGGSGGGGSGGNGSGGGGSGGGGSGGGGSGGGGSAPDVQDCPECTLQENPFFSQPGAPILQCMGCCFSRAYPTPLRSKKTMLVQKNVTSESTCCVAKSYNRVTVMGGFKVENHTACHCSTCYYHKSGGGGSGGGGSGGNGSGGGGSFCIPTEYTMHIERRECAYCLTINTTICAGYCMTRDINGKLFLPKYALSQDVCTYRDFIYRTVEIPGCPLHVAPYFSYPVALSCKCGKCNTDYSDCIHEAIKTNYCTKPQKSY

SEQ ID NO: 56 - protein, 657 aa, Artificial
  TSH alpha beta fusion protein
GMGCSSPPCECHQEEDFRVTCKDIQRIPSLPPSTQTLKLIETHLRTIPSHAFSNLPNISRIYVSIDVTLQQLESHSFYNLSKVTHIEIRNTRNLTYIDPDALKELPLLKFLGIFNTGLKMFPDLTKVYSTDIFFILEITDNPYMTSIPVNAFQGLCNETLTLKLYNNGFTSVQGYAFNGTKLDAVYLNKNKYLTVIDKDAFGGVYSGPSLLDVSQTSVTALPSKGLEHLKELIARNTWTLKKLPLSLSFLHLTRADLSYPSHCCAFKNQKKIRGILESLMCNESSMQSLRQRKSVNALNSPLHQEYEENLGDSIVGYKEKSKFQDTHNNAHYYVFFEEQEDEIIGFGQELKNPQEETLQAFDSHYDYTICGDSEDMVCTPKSDEFNPCEDIMGGGGGSGGGGSGGNGSGGGGSGGGGSGGGGSGGGGSGGGGSAPDVQDCPECTLQENPFFSQPGAPILQCMGCCFSRAYPTPLRSKKTMLVQKNVTSESTCCVAKSYNRVTVMGGFKVENHTACHCSTCYYHKSGGGGSGGGGSGGNGSGGGGSFCIPTEYTMHIERRECAYCLTINTTICAGYCMTRDINGKLFLPKYALSQDVCTYRDFIYRTVEIPGCPLHVAPYFSYPVALSCKCGKCNTDYSDCIHEAIKTNYCTKPQKSY

SEQ ID NO: 57 - protein, 403 aa, Artificial
  TSH beta fusion protein
GMGCSSPPCECHQEEDFRVTCKDIQRIPSLPPSTQTLKLIETHLRTIPSHAFSNLPNISRIYVSIDVTLQQLESHSFYNLSKVTHIEIRNTRNLTYIDPDALKELPLLKFLGIFNTGLKMFPDLTKVYSTDIFFILEITDNPYMTSIPVNAFQGLCNETLTLKLYNNGFTSVQGYAFNGTKLDAVYLNKNKYLTVIDKDAFGGVYSGPSLLDVSQTSVTALPSKGLEHLKELIARNTWTLKKLPLSLSFLHLTRADGGGGSGGGGSGGNGSGGGGSGGGGSGGGGSGGGGSFCIPTEYTMHIERRECAYCLTINTTICAGYCMTRDINGKLFLPKYALSQDVCTYRDFIYRTVEIPGCPLHVAPYFSYPVALSCKCGKCNTDYSDCIHEAIKTNYCTKPQKSY

SEQ ID NO: 58 - protein, 379 aa, Artificial
  TSH beta fusion protein
GMGCSSPPCECHQEEDFRVTCKDIQRIPSLPPSTQTLKLIETHLRTIPSHAFSNLPNISRIYVSIDVTLQQLESHSFYNLSKVTHIEIRNTRNLTYIDPDALKELPLLKFLGIFNTGLKMFPDLTKVYSTDIFFILEITDNPYMTSIPVNAFQGLCNETLTLKLYNNGFTSVQGYAFNGTKLDAVYLNKNKYLTVIDKDAFGGVYSGPSLLLPLGRKSLSFETQKAPSSSTPGGGGSGGGGSGGNGSGGGGSGGGGSGGGGSGGGGSFCIPTEYTMHIERRECAYCLTINTTICAGYCMTRDINGKLFLPKYALSQDVCTYRDFIYRTVEIPGCPLHVAPYFSYPVALSCKCGKCNTDYSDCIHEAIKTNYCTKPQKSY

SEQ ID NO: 59 - protein, 545 aa, Artificial
  TSH beta fusion protein
GMGCSSPPCECHQEEDFRVTCKDIQRIPSLPPSTQTLKLIETHLRTIPSHAFSNLPNISRIYVSIDVTLQQLESHSFYNLSKVTHIEIRNTRNLTYIDPDALKELPLLKFLGIFNTGLKMFPDLTKVYSTDIFFILEITDNPYMTSIPVNAFQGLCNETLTLKLYNNGFTSVQGYAFNGTKLDAVYLNKNKYLTVIDKDAFGGVYSGPSLLDVSQTSVTALPSKGLEHLKELIARNTWTLKKLPLSLSFLHLTRADLSYPSHCCAFKNQKKIRGILESLMCNESSMQSLRQRKSVNALNSPLHQEYEENLGDSIVGYKEKSKFQDTHNNAHYYVFFEEQEDEIIGFGQELKNPQEETLQAFDSHYDYTICGDSEDMVCTPKSDEFNPCEDIMGGGGGSGGGGSGGNGSGGGGSGGGGSGGGGSGGGGSGGGGSFCIPTEYTMHIERRECAYCLTINTTICAGYCMTRDINGKLFLPKYALSQDVCTYRDFIYRTVEIPGCPLHVAPYFSYPVALSCKCGKCNTDYSDCIHEAIKTNYCTKPQKSY

SEQ ID NO: 60 - protein, 383 aa, Artificial
  TSH alpha fusion protein
GMGCSSPPCECHQEEDFRVTCKDIQRIPSLPPSTQTLKLIETHLRTIPSHAFSNLPNISRIYVSIDVTLQQLESHSFYNLSKVTHIEIRNTRNLTYIDPDALKELPLLKFLGIFNTGLKMFPDLTKVYSTDIFFILEITDNPYMTSIPVNAFQGLCNETLTLKLYNNGFTSVQGYAFNGTKLDAVYLNKNKYLTVIDKDAFGGVYSGPSLLDVSQTSVTALPSKGLEHLKELIARNTWTLKKLPLSLSFLHLTRADGGGGSGGGGSGGNGSGGGGSGGGGSGGGGSGGGGSAPDVQDCPECTLQENPFFSQPGAPILQCMGCCFSRAYPTPLRSKKTMLVQKNVTSESTCCVAKSYNRVTVMGGFKVENHTACHCSTCYYHKS

SEQ ID NO: 61 - protein, 359 aa, Artificial
  TSH alpha fusion protein
GMGCSSPPCECHQEEDFRVTCKDIQRIPSLPPSTQTLKLIETHLRTIPSHAFSNLPNISRIYVSIDVTLQQLESHSFYNLSKVTHIEIRNTRNLTYIDPDALKELPLLKFLGIFNTGLKMFPDLTKVYSTDIFFILEITDNPYMTSIPVNAFQGLCNETLTLKLYNNGFTSVQGYAFNGTKLDAVYLNKNKYLTVIDKDAFGGVYSGPSLLLPLGRKSLSFETQKAPSSSTPGGGGSGGGGSGGNGSGGGGSGGGGSGGGGSGGGGSAPDVQDCPECTLQENPFFSQPGAPILQCMGCCFSRAYPTPLRSKKTMLVQKNVTSESTCCVAKSYNRVTVMGGFKVENHTACHCSTCYYHKS

SEQ ID NO: 62 - protein, 520 aa, Artificial
  TSH alpha fusion protein
GMGCSSPPCECHQEEDFRVTCKDIQRIPSLPPSTQTLKLIETHLRTIPSHAFSNLPNISRIYVSIDVTLQQLESHSFYNLSKVTHIEIRNTRNLTYIDPDALKELPLLKFLGIFNTGLKMFPDLTKVYSTDIFFILEITDNPYMTSIPVNAFQGLCNETLTLKLYNNGFTSVQGYAFNGTKLDAVYLNKNKYLTVIDKDAFGGVYSGPSLLDVSQTSVTALPSKGLEHLKELIARNTWTLKKLPLSLSFLHLTRADLSYPSHCCAFKNQKKIRGILESLMCNESSMQSLRQRKSVNALNSPLHQEYEENLGDSIVGYKEKSKFQDTHNNAHYYVFFEEQEDEIIGFGQELKNPQEETLQAFDSHYDYTICGDSEDMVCTPKSDEFNPCEDIMGGGGGSGGGGSGGNGSGGGGSGGGGSGGGGSGGGGSAPDVQDCPECTLQENPFFSQPGAPILQCMGCCFSRAYPTPLRSKKTMLVQKNVTSESTCCVAKSYNRVTVMGGFKVENHTACHCSTCYYHKS

SEQ ID NO: 63 - protein, 525 aa, Artificial
  TSH alpha beta fusion protein
APDVQDCPECTLQENPFFSQPGAPILQCMGCCFSRAYPTPLRSKKTMLVQKNVTSESTCCVAKSYNRVTVMGGFKVENHTACHCSTCYYHKSGGGGSGGGGSGGGGSGGNGSGGGGSGGGGSGMGCSSPPCECHQEEDFRVTCKDIQRIPSLPPSTQTLKLIETHLRTIPSHAFSNLPNISRIYVSIDVTLQQLESHSFYNLSKVTHIEIRNTRNLTYIDPDALKELPLLKFLGIFNTGLKMFPDLTKVYSTDIFFILEITDNPYMTSIPVNAFQGLCNETLTLKLYNNGFTSVQGYAFNGTKLDAVYLNKNKYLTVIDKDAFGGVYSGPSLLDVSQTSVTALPSKGLEHLKELIARNTWTLKKLPLSLSFLHLTRADGGGGSGGGGSGGNGSGGGGSGGGGSGGGGSGGGGSFCIPTEYTMHIERRECAYCLTINTTICAGYCMTRDINGKLFLPKYALSQDVCTYRDFIYRTVEIPGCPLHVAPYFSYPVALSCKCGKCNTDYSDCIHEAIKTNYCTKPQKSY

SEQ ID NO: 64 - protein, 501 aa, Artificial
  TSH alpha beta fusion protein
APDVQDCPECTLQENPFFSQPGAPILQCMGCCFSRAYPTPLRSKKTMLVQKNVTSESTCCVAKSYNRVTVMGGFKVENHTACHCSTCYYHKSGGGGSGGGGSGGGGSGGNGSGGGGSGGGGSGMGCSSPPCECHQEEDFRVTCKDIQRIPSLPPSTQTLKLIETHLRTIPSHAFSNLPNISRIYVSIDVTLQQLESHSFYNLSKVTHIEIRNTRNLTYIDPDALKELPLLKFLGIFNTGLKMFPDLTKVYSTDIFFILEITDNPYMTSIPVNAFQGLCNETLTLKLYNNGFTSVQGYAFNGTKLDAVYLNKNKYLTVIDKDAFGGVYSGPSLLLPLGRKSLSFETQKAPSSSTPGGGGSGGGGSGGNGSGGGGSGGGGSGGGGSGGGGSFCIPTEYTMHIERRECAYCLTINTTICAGYCMTRDINGKLFLPKYALSQDVCTYRDFIYRTVEIPGCPLHVAPYFSYPVALSCKCGKCNTDYSDCIHEAIKTNYCTKPQKSY

SEQ ID NO: 65 - protein, 667 aa, Artificial
  TSH alpha beta fusion protein
APDVQDCPECTLQENPFFSQPGAPILQCMGCCFSRAYPTPLRSKKTMLVQKNVTSESTCCVAKSYNRVTVMGGFKVENHTACHCSTCYYHKSGGGGSGGGGSGGGGSGGNGSGGGGSGGGGSGMGCSSPPCECHQEEDFRVTCKDIQRIPSLPPSTQTLKLIETHLRTIPSHAFSNLPNISRIYVSIDVTLQQLESHSFYNLSKVTHIEIRNTRNLTYIDPDALKELPLLKFLGIFNTGLKMFPDLTKVYSTDIFFILEITDNPYMTSIPVNAFQGLCNETLTLKLYNNGFTSVQGYAFNGTKLDAVYLNKNKYLTVIDKDAFGGVYSGPSLLDVSQTSVTALPSKGLEHLKELIARNTWTLKKLPLSLSFLHLTRADLSYPSHCCAFKNQKKIRGILESLMCNESSMQSLRQRKSVNALNSPLHQEYEENLGDSIVGYKEKSKFQDTHNNAHYYVFFEEQEDEIIGFGQELKNPQEETLQAFDSHYDYTICGDSEDMVCTPKSDEFNPCEDIMGGGGGSGGGGSGGNGSGGGGSGGGGSGGGGSGGGGSGGGGSFCIPTEYTMHIERRECAYCLTINTTICAGYCMTRDINGKLFLPKYALSQDVCTYRDFIYRTVEIPGCPLHVAPYFSYPVALSCKCGKCNTDYSDCIHEAIKTNYCTKPQKSY

SEQ ID NO: 66 - protein, 530 aa, Artificial
  TSH beta alpha fusion protein
FCIPTEYTMHIERRECAYCLTINTTICAGYCMTRDINGKLFLPKYALSQDVCTYRDFIYRTVEIPGCPLHVAPYFSYPVALSCKCGKCNTDYSDCIHEAIKTNYCTKPQKSYGGGGSGGGGSGGGGSGGGGSGGNGSGGGGSGGGGSGMGCSSPPCECHQEEDFRVTCKDIQRIPSLPPSTQTLKLIETHLRTIPSHAFSNLPNISRIYVSIDVTLQQLESHSFYNLSKVTHIEIRNTRNLTYIDPDALKELPLLKFLGIFNTGLKMFPDLTKVYSTDIFFILEITDNPYMTSIPVNAFQGLCNETLTLKLYNNGFTSVQGYAFNGTKLDAVYLNKNKYLTVIDKDAFGGVYSGPSLLDVSQTSVTALPSKGLEHLKELIARNTWTLKKLPLSLSFLHLTRADGGGGSGGGGSGGNGSGGGGSGGGGSGGGGSGGGGSAPDVQDCPECTLQENPFFSQPGAPILQCMGCCFSRAYPTPLRSKKTMLVQKNVTSESTCCVAKSYNRVTVMGGFKVENHTACHCSTCYYHKS

SEQ ID NO: 67 - protein, 506 aa, Artificial
  TSH beta alpha fusion protein
FCIPTEYTMHIERRECAYCLTINTTICAGYCMTRDINGKLFLPKYALSQDVCTYRDFIYRTVEIPGCPLHVAPYFSYPVALSCKCGKCNTDYSDCIHEAIKTNYCTKPQKSYGGGGSGGGGSGGGGSGGGGSGGNGSGGGGSGGGGSGMGCSSPPCECHQEEDFRVTCKDIQRIPSLPPSTQTLKLIETHLRTIPSHAFSNLPNISRIYVSIDVTLQQLESHSFYNLSKVTHIEIRNTRNLTYIDPDALKELPLLKFLGIFNTGLKMFPDLTKVYSTDIFFILEITDNPYMTSIPVNAFQGLCNETLTLKLYNNGFTSVQGYAFNGTKLDAVYLNKNKYLTVIDKDAFGGVYSGPSLLLPLGRKSLSFETQKAPSSSTPGGGGSGGGGSGGNGSGGGGSGGGGSGGGGSGGGGSAPDVQDCPECTLQENPFFSQPGAPILQCMGCCFSRAYPTPLRSKKTMLVQKNVTSESTCCVAKSYNRVTVMGGFKVENHTACHCSTCYYHKS

SEQ ID NO: 68 - protein, 672 aa, Artificial
  TSH beta alpha fusion protein
FCIPTEYTMHIERRECAYCLTINTTICAGYCMTRDINGKLFLPKYALSQDVCTYRDFIYRTVEIPGCPLHVAPYFSYPVALSCKCGKCNTDYSDCIHEAIKTNYCTKPQKSYGGGGSGGGGSGGGGSGGGGSGGNGSGGGGSGGGGSGMGCSSPPCECHQEEDFRVTCKDIQRIPSLPPSTQTLKLIETHLRTIPSHAFSNLPNISRIYVSIDVTLQQLESHSFYNLSKVTHIEIRNTRNLTYIDPDALKELPLLKFLGIFNTGLKMFPDLTKVYSTDIFFILEITDNPYMTSIPVNAFQGLCNETLTLKLYNNGFTSVQGYAFNGTKLDAVYLNKNKYLTVIDKDAFGGVYSGPSLLDVSQTSVTALPSKGLEHLKELIARNTWTLKKLPLSLSFLHLTRADLSYPSHCCAFKNQKKIRGILESLMCNESSMQSLRQRKSVNALNSPLHQEYEENLGDSIVGYKEKSKFQDTHNNAHYYVFFEEQEDEIIGFGQELKNPQEETLQAFDSHYDYTICGDSEDMVCTPKSDEFNPCEDIMGGGGGSGGGGSGGNGSGGGGSGGGGSGGGGSGGGGSGGGGSAPDVQDCPECTLQENPFFSQPGAPILQCMGCCFSRAYPTPLRSKKTMLVQKNVTSESTCCVAKSYNRVTVMGGFKVENHTACHCSTCYYHKS

SEQ ID NO: 69 - protein, 510 aa, Artificial
  TSH beta alpha fusion protein
FCIPTEYTMHIERRECAYCLTINTTICAGYCMTRDINGKLFLPKYALSQDVCTYRDFIYRTVEIPGCPLHVAPYFSYPVALSCKCGKCNTDYSDCIHEAIKTNYCTKPQKSYGGGGSGGGGSGGNGTGGGGSAPDVQDCPECTLQENPFFSQPGAPILQCMGCCFSRAYPTPLRSKKTMLVQKNVTSESTCCVAKSYNRVTVMGGFKVENHTACHCSTCYYHKSGGGGSGGGGSGGGGSGGNGTGGGGSGGGGSGMGCSSPPCECHQEEDFRVTCKDIQRIPSLPPSTQTLKLIETHLRTIPSHAFSNLPNISRIYVSIDVTLQQLESHSFYNLSKVTHIEIRNTRNLTYIDPDALKELPLLKFLGIFNTGLKMFPDLTKVYSTDIFFILEITDNPYMTSIPVNAFQGLCNETLTLKLYNNGFTSVQGYAFNGTKLDAVYLNKNKYLTVIDKDAFGGVYSGPSLLDVSQTSVTALPSKGLEHLKELIARNTWTLKKLPLSLSFLHLTRAD

SEQ ID NO: 70 - protein, 485 aa, Artificial
  TSH beta alpha fusion protein
FCIPTEYTMHIERRECAYCLTINTTICAGYCMTRDINGKLFLPKYALSQDVCTYRDFIYRTVEIPGCPLHVAPYFSYPVALSCKCGKCNTDYSDCIHEAIKTNYCTKPQKSYGGGGSGGGGSGGNGTGGGGSAPDVQDCPECTLQENPFFSQPGPILQCMGCCFSRAYPTPLRSKKTMLVQKNVTSESTCCVAKSYNRVTVMGGFKVENHTACHCSTCYYHKSGGGGSGGGGSGGGGSGGNGTGGGGSGGGGSGMGCSSPPCECHQEEDFRVTCKDIQRIPSLPPSTQTLKLIETHLRTIPSHAFSNLPNISRIYVSIDVTLQQLESHSFYNLSKVTHIEIRNTRNLTYIDPDALKELPLLKFLGIFNTGLKMFPDLTKVYSTDIFFILEITDNPYMTSIPVNAFQGLCNETLTLKLYNNGFTSVQGYAFNGTKLDAVYLNKNKYLTVIDKDAFGGVYSGPSLLLPLGRKSLSFETQKAPSSSTP

SEQ ID NO: 71 - protein, 646 aa, Artificial
  TSH beta alpha fusion protein
FCIPTEYTMHIERRECAYCLTINTTICAGYCMTRDINGKLFLPKYALSQDVCTYRDFIYRTVEIPGCPLHVAPYFSYPVALSCKCGKCNTDYSDCIHEAIKTNYCTKPQKSYGGGGSGGGGSGGNGTGGGGSAPDVQDCPECTLQENPFFSQPGPILQCMGCCFSRAYPTPLRSKKTMLVQKNVTSESTCCVAKSYNRVTVMGGFKVENHTACHCSTCYYHKSGGGGSGGGGSGGGGSGGNGTGGGGSGGGGSGMGCSSPPCECHQEEDFRVTCKDIQRIPSLPPSTQTLKLIETHLRTIPSHAFSNLPNISRIYVSIDVTLQQLESHSFYNLSKVTHIEIRNTRNLTYIDPDALKELPLLKFLGIFNTGLKMFPDLTKVYSTDIFFILEITDNPYMTSIPVNAFQGLCNETLTLKLYNNGFTSVQGYAFNGTKLDAVYLNKNKYLTVIDKDAFGGVYSGPSLLDVSQTSVTALPSKGLEHLKELIARNTWTLKKLPLSLSFLHLTRADLSYPSHCCAFKNQKKIRGILESLMCNESSMQSLRQRKSVNALNSPLHQEYEENLGDSIVGYKEKSKFQDTHNNAHYYVFFEEQEDEIIGFGQELKNPQEETLQAFDSHYDYTICGDSEDMVCTPKSDEFNPCEDIMG

SEQ ID NO: 72 - protein, 515 aa, Artificial
  TSH alpha beta fusion protein
APDVQDCPECTLQENPFFSQPGAPILQCMGCCFSRAYPTPLRSKKTMLVQKNVTSESTCCVAKSYNRVTVMGGFKVENHTACHCSTCYYHKSGGGGSGGGGSGGNGTGGGGSFCIPTEYTMHIERRECAYCLTINTTICAGYCMTRDINGKLFLPKYALSQDVCTYRDFIYRTVEIPGCPLHVAPYFSYPVALSCKCGKCNTDYSDCIHEAIKTNYCTKPQKSYGGGGSGGGGSGGGGSGGGGSGGNGTGGGGSGGGGSGMGCSSPPCECHQEEDFRVTCKDIQRIPSLPPSTQTLKLIETHLRTIPSHAFSNLPNISRIYVSIDVTLQQLESHSFYNLSKVTHIEIRNTRNLTYIDPDALKELPLLKFLGIFNTGLKMFPDLTKVYSTDIFFILEITDNPYMTSIPVNAFQGLCNETLTLKLYNNGFTSVQGYAFNGTKLDAVYLNKNKYLTVIDKDAFGGVYSGPSLLDVSQTSVTALPSKGLEHLKELIARNTWTLKKLPLSLSFLHLTRAD

SEQ ID NO: 73 - protein, 491 aa, Artificial
  TSH alpha beta fusion protein
APDVQDCPECTLQENPFFSQPGAPILQCMGCCFSRAYPTPLRSKKTMLVQKNVTSESTCCVAKSYNRVTVMGGFKVENHTACHCSTCYYHKSGGGGSGGGGSGGNGTGGGGSFCIPTEYTMHIERRECAYCLTINTTICAGYCMTRDINGKLFLPKYALSQDVCTYRDFIYRTVEIPGCPLHVAPYFSYPVALSCKCGKCNTDYSDCIHEAIKTNYCTKPQKSYGGGGSGGGGSGGGGSGGGGSGGNGTGGGGSGGGGSGMGCSSPPCECHQEEDFRVTCKDIQRIPSLPPSTQTLKLIETHLRTIPSHAFSNLPNISRIYVSIDVTLQQLESHSFYNLSKVTHIEIRNTRNLTYIDPDALKELPLLKFLGIFNTGLKMFPDLTKVYSTDIFFILEITDNPYMTSIPVNAFQGLCNETLTLKLYNNGFTSVQGYAFNGTKLDAVYLNKNKYLTVIDKDAFGGVYSGPSLLLPLGRKSLSFETQKAPSSSTP

SEQ ID NO: 74 - protein, 651 aa, Artificial
  TSH alpha beta fusion protein
APDVQDCPECTLQENPFFSQPGAPILQCMGCCFSRAYPTPLRSKKTMLVQKNVTSESTCCVAKSYNRVTVMGGFKVENHTACHCSTCYYHKSGGGGSGGGGSGGNGTGGGGSFCIPTEYTMHIERRECAYCLTINTTICAGYCMTRDINGKLFLKYALSQDVCTYRDFIYRTVEIPGCPLHVAPYFSYPVALSCKCGKCNTDYSDCIHEAIKTNYCTKPQKSYGGGGSGGGGSGGGGSGGGGSGGNGTGGGGSGGGGSGMGCSSPPCECHQEEDFRVTCKDIQRIPSLPPSTQTLKLIETHLRTIPSHAFSNLPNISRIYVSIDVTLQQLESHSFYNLSKVTHIEIRNTRNLTYIDPDALKELPLLKFLGIFNTGLKMFPDLTKVYSTDIFFILEITDNPYMTSIPVNAFQGLCNETLTLKLYNNGFTSVQGYAFNGTKLDAVYLNKNKYLTVIDKDAFGGVYSGPSLLDVSQTSVTALPSKGLEHLKELIARNTWTLKKLPLSLSFLHLTRADLSYPSHCCAFKNQKKIRGILESLMCNESSMQSLRQRKSVNALNSPLHQEYEENLGDSIVGYKEKSKFQDTHNNAHYYVFFEEQEDEIIGFGQELKNPQEETLQAFDSHYDYTICGDSEDMVCTPKSDEFNPCEDIMG

SEQ ID NO: 75 - protein, 403 aa, Artificial
  TSH beta fusion protein
FCIPTEYTMHIERRECAYCLTINTTICAGYCMTRDINGKLFLPKYALSQDVCTYRDFIYRTVEIPGCPLHVAPYFSYPVALSCKCGKCNTDYSDCIHEAIKTNYCTKPQKSYGGGGSGGGGSGGGGSGGGGSGGNGTGGGGSGGGGSGMGCSSPPCECHQEEDFRVTCKDIQRIPSLPPSTQTLKLIETHLRTIPSHAFSNLPNISRIYVSIDVTLQQLESHSFYNLSKVTHIEIRNTRNLTYIDPDALKELPLLKFLGIFNTGLKMFPDLTKVYSTDIFFILEITDNPYMTSIPVNAFQGLCNETLTLKLYNNGFTSVQGYAFNGTKLDAVYLNKNKYLTVIDKDAFGGVYSGPSLLDVSQTSVTALPSKGLEHLKELIARNTWTLKKLPLSLSFLHLTRAD

SEQ ID NO: 76 - protein, 379 aa, Artificial
  TSH beta fusion protein
FCIPTEYTMHIERRECAYCLTINTTICAGYCMTRDINGKLFLPKYALSQDVCTYRDFIYRTVEIPGCPLHVAPYFSYPVALSCKCGKCNTDYSDCIHEAIKTNYCTKPQKSYGGGGSGGGGSGGGGSGGGGSGGNGTGGGGSGGGGSGMGCSSPPCECHQEEDFRVTCKDIQRIPSLPPSTQTLKLIETHLRTIPSHAFSNLPNISRIYVSIDVTLQQLESHSFYNLSKVTHIEIRNTRNLTYIDPDALKELPLLKFLGIFNTGLKMFPDLTKVYSTDIFFILEITDNPYMTSIPVNAFQGLCNETLTLKLYNNGFTSVQGYAFNGTKLDAVYLNKNKYLTVIDKDAFGGVYSGPSLLLPLGRKSLSFETQKAPSSSTP

SEQ ID NO: 77 - protein, 540 aa, Artificial
  TSH beta receptor fusion protein
FCIPTEYTMHIERRECAYCLTINTTICAGYCMTRDINGKLFLPKYALSQDVCTYRDFIYRTVEIPGCPLHVAPYFSYPVALSCKCGKCNTDYSDCIHEAIKTNYCTKPQKSYGGGGSGGGGSGGGGSGGGGSGGNGTGGGGSGGGGSGMGCSSPPCECHQEEDFRVTCKDIQRIPSLPPSTQTLKLIETHLRTIPSHAFSNLPNISRIYVSIDVTLQQLESHSFYNLSKVTHIEIRNTRNLTYIDPDALKELPLLKFLGIFNTGLKMFPDLTKVYSTDIFFILEITDNPYMTSIPVNAFQGLCNETLTLKLYNNGFTSVQGYAFNGTKLDAVYLNKNKYLTVIDKDAFGGVYSGPSLLDVSQTSVTALPSKGLEHLKELIARNTWTLKKLPLSLSFLHLTRADLSYPSHCCAFKNQKKIRGILESLMCNESSMQSLRQRKSVNALNSPLHQEYEENLGDSIVGYKEKSKFQDTHNNAHYYVFFEEQEDEIIGFGQELKNPQEETLQAFDSHYDYTICGDSEDMVCTPKSDEFNPCEDIMG

SEQ ID NO: 78 - protein, 378 aa, Artificial
  TSH alpha fusion protein
APDVQDCPECTLQENPFFSQPGAPILQCMGCCFSRAYPTPLRSKKTMLVQKNVTSESTCCVAKSYNRVTVMGGFKVENHTACHCSTCYYHKSGGGGSGGGGSGGGGSGGGGSGGNGTGGGGSGMGCSSPPCECHQEEDFRVTCKDIQRIPSLPPSTQTLKLIETHLRTIPSHAFSNLPNISRIYVSIDVTLQQLESHSFYNLSKVTHIEIRNTRNLTYIDPDALKELPLLKFLGIFNTGLKMFPDLTKVYSTDIFFILEITDNPYMTSIPVNAFQGLCNETLTLKLYNNGFTSVQGYAFNGTKLDAVYLNKNKYLTVIDKDAFGGVYSGPSLLDVSQTSVTALPSKGLEHLKELIARNTWTLKKLPLSLSFLHLTRAD

SEQ ID NO: 79 - protein, 354 aa, Artificial
  TSH alpha fusion protein
APDVQDCPECTLQENPFFSQPGAPILQCMGCCFSRAYPTPLRSKKTMLVQKNVTSESTCCVAKSYNRVTVMGGFKVENHTACHCSTCYYHKSGGGGSGGGGSGGGGSGGGGSGGNGTGGGGSGMGCSSPPCECHQEEDFRVTCKDIQRIPSLPPSTQTLKLIETHLRTIPSHAFSNLPNISRIYVSIDVTLQQLESHSFYNLSKVTHIEIRNTRNLTYIDPDALKELPLLKFLGIFNTGLKMFPDLTKVYSTDIFFILEITDNPYMTSIPVNAFQGLCNETLTLKLYNNGFTSVQGYAFNGTKLDAVYLNKNKYLTVIDKDAFGGVYSGPSLLLPLGRKSLSFETQKAPSSSTP

SEQ ID NO: 80 - protein, 515 aa, Artificial
  TSH alpha receptor fusion protein
APDVQDCPECTLQENPFFSQPGAPILQCMGCCFSRAYPTPLRSKKTMLVQKNVTSESTCCVAKSYNRVTVMGGFKVENHTACHCSTCYYHKSGGGGSGGGGSGGGGSGGGGSGGNGTGGGGSGMGCSSPPCECHQEEDFRVTCKDIQRIPSLPPSTQTLKLIETHLRTIPSHAFSNLPNISRIYVSIDVTLQQLESHSFYNLSKVTHIEIRNTRNLTYIDPDALKELPLLKFLGIFNTGLKMFPDLTKVYSTDIFFILEITDNPYMTSIPVNAFQGLCNETLTLKLYNNGFTSVQGYAFNGTKLDAVYLNKNKYLTVIDKDAFGGVYSGPSLLDVSQTSVTALPSKGLEHLKELIARNTWTLKKLPLSLSFLHLTRADLSYPSHCCAFKNQKKIRGILESLMCNESSMQSLRQRKSVNALNSPLHQEYEENLGDSIVGYKEKSKFQDTHNNAHYYVFFEEQEDEIIGFGQELKNPQEETLQAFDSHYDYTICGDSEDMVCTPKSDEFNPCEDIMG

SEQ ID NO: 81 - protein, 515 aa, Artificial
  TSH beta alpha fusion protein
GMGCSSPPCECHQEEDFRVTCKDIQRIPSLPPSTQTLKLIETHLRTIPSHAFSNLPNISRIYVSIDVTLQQLESHSFYNLSKVTHIEIRNTRNLTYIDPDALKELPLLKFLGIFNTGLKMFPDLTKVYSTDIFFILEITDNPYMTSIPVNAFQGLCNETLTLKLYNNGFTSVQGYAFNGTKLDAVYLNKNKYLTVIDKDAFGGVYSGPSLLDVSQTSVTALPSKGLEHLKELIARNTWTLKKLPLSLSFLHLTRADGGGGSGGGGSGGNGTGGGGSGGGGSGGGGSGGGGSFCIPTEYTMHIERRECAYCLTINTTICAGYCMTRDINGKLFLPKYALSQDVCTYRDFIYRTVEIPGCPLHVAPYFSYPVALSCKCGKCNTDYSDCIHEAIKTNYCTKPQKSYGGGGSGGGGSGGNGTGGGGSAPDVQDCPECTLQENPFFSQPGAPILQCMGCCFSRAYPTPLRSKKTMLVQKNVTSESTCCVAKSYNRVTVMGGFKVENHTACHCSTCYYHKS

SEQ ID NO: 82 - protein, 491 aa, Artificial
  TSH beta alpha fusion protein
GMGCSSPPCECHQEEDFRVTCKDIQRIPSLPPSTQTLKLIETHLRTIPSHAFSNLPNISRIYVSIDVTLQQLESHSFYNLSKVTHIEIRNTRNLTYIDPDALKELPLLKFLGIFNTGLKMFPDLTKVYSTDIFFILEITDNPYMTSIPVNAFQGLCNETLTLKLYNNGFTSVQGYAFNGTKLDAVYLNKNKYLTVIDKDAFGGVYSGPSLLLPLGRKSLSFETQKAPSSSTPGGGGSGGGGSGGNGTGGGGSGGGGSGGGGSGGGGSFCIPTEYTMHIERRECAYCLTINTTICAGYCMTRDINGKLFLPKYALSQDVCTYRDFIYRTVEIPGCPLHVAPYFSYPVALSCKCGKCNTDYSDCIHEAIKTNYCTKPQKSYGGGGSGGGGSGGNGTGGGGSAPDVQDCPECTLQENPFFSQPGAPILQCMGCCFSRAYPTPLRSKKTMLVQKNVTSESTCCVAKSYNRVTVMGGFKVENHTACHCSTCYYHKS

SEQ ID NO: 83 - protein, 657 aa, Artificial
  TSH beta alpha fusion protein
GMGCSSPPCECHQEEDFRVTCKDIQRIPSLPPSTQTLKLIETHLRTIPSHAFSNLPNISRIYVSIDVTLQQLESHSFYNLSKVTHIEIRNTRNLTYIDPDALKELPLLKFLGIFNTGLKMFPDLTKVYSTDIFFILEITDNPYMTSIPVNAFQGLCNETLTLKLYNNGFTSVQGYAFNGTKLDAVYLNKNKYLTVIDKDAFGGVYSGPSLLDVSQTSVTALPSKGLEHLKELIARNTWTLKKLPLSLSFLHLTRADLSYPSHCCAFKNQKKIRGILESLMCNESSMQSLRQRKSVNALNSPLHQEYEENLGDSIVGYKEKSKFQDTHNNAHYYVFFEEQEDEIIGFGQELKNPQEETLQAFDSHYDYTICGDSEDMVCTPKSDEFNPCEDIMGGGGGSGGGGSGGGGSGGGGSGGGGSGGNGTGGGGSGGGGSFCIPTEYTMHIERRECAYCLTINTTICAGYCMTRDINGKLFLPKYALSQDVCTYRDFIYRTVEIPGCPLHVAPYFSYPVALSCKCGKCNTDYSDCIHEAIKTNYCTKPQKSYGGGGSGGGGSGGNGTGGGGSAPDVQDCPECTLQENPFFSQPGAPILQCMGCCFSRAYPTPLRSKKTMLVQKNVTSESTCCVAKSYNRVTVMGGFKVENHTACHCSTCYYHKS

SEQ ID NO: 84 - protein, 515 aa, Artificial
  TSH alpha beta fusion protein
GMGCSSPPCECHQEEDFRVTCKDIQRIPSLPPSTQTLKLIETHLRTIPSHAFSNLPNISRIYVSIDVTLQQLESHSFYNLSKVTHIEIRNTRNLTYIDPDALKELPLLKFLGIFNTGLKMFPDLTKVYSTDIFFILEITDNPYMTSIPVNAFQGLCNETLTLKLYNNGFTSVQGYAFNGTKLDAVYLNKNKYLTVIDKDAFGGVYSGPSLLDVSQTSVTALPSKGLEHLKELIARNTWTLKKLPLSLSFLHLTRADGGGGSGGGGSGGNGTGGGGSGGGGSGGGGSGGGGSAPDVQDCPECTLQENPFFSQPGAPILQCMGCCFSRAYPTPLRSKKTMLVQKNVTSESTCCVAKSYNRVTVMGGFKVENHTACHCSTCYYHKSGGGGSGGGGSGGNGTGGGGSFCIPTEYTMHIERRECAYCLTINTTICAGYCMTRDINGKLFLPKYALSQDVCTYRDFIYRTVEIPGCPLHVAPYFSYPVALSCKCGKCNTDYSDCIHEAIKTNYCTKPQKSY

SEQ ID NO: 85 - protein, 491 aa, Artificial
  TSH alpha beta fusion protein
GMGCSSPPCECHQEEDFRVTCKDIQRIPSLPPSTQTLKLIETHLRTIPSHAFSNLPNISRIYVSIDVTLQQLESHSFYNLSKVTHIEIRNTRNLTYIDPDALKELPLLKFLGIFNTGLKMFPDLTKVYSTDIFFILEITDNPYMTSIPVNAFQGLCNETLTLKLYNNGFTSVQGYAFNGTKLDAVYLNKNKYLTVIDKDAFGGVYSGPSLLLPLGRKSLSFETQKAPSSSTPGGGGSGGGGSGGNGTGGGGSGGGGSGGGGSGGGGSAPDVQDCPECTLQENPFFSQPGAPILQCMGCCFSRAYPTPLRSKKTMLVQKNVTSESTCCVAKSYNRVTVMGGFKVENHTACHCSTCYYHKSGGGGSGGGGSGGNGTGGGGSFCIPTEYTMHIERRECAYCLTINTTICAGYCMTRDINGKLFLPKYALSQDVCTYRDFIYRTVEIPGCPLHVAPYFSYPVALSCKCGKCNTDYSDCIHEAIKTNYCTKPQKSY

SEQ ID NO: 86 - protein, 491 aa, Artificial; identical to SEQ ID NO: 85
  TSH alpha beta fusion protein

SEQ ID NO: 87 - protein, 403 aa, Artificial
  TSH beta fusion protein
GMGCSSPPCECHQEEDFRVTCKDIQRIPSLPPSTQTLKLIETHLRTIPSHAFSNLPNISRIYVSIDVTLQQLESHSFYNLSKVTHIEIRNTRNLTYIDPDALKELPLLKFLGIFNTGLKMFPDLTKVYSTDIFFILEITDNPYMTSIPVNAFQGLCNETLTLKLYNNGFTSVQGYAFNGTKLDAVYLNKNKYLTVIDKDAFGGVYSGPSLLDVSQTSVTALPSKGLEHLKELIARNTWTLKKLPLSLSFLHLTRADGGGGSGGGGSGGNGTGGGGSGGGGSGGGGSGGGGSFCIPTEYTMHIERRECAYCLTINTTICAGYCMTRDINGKLFLPKYALSQDVCTYRDFIYRTVEIPGCPLHVAPYFSYPVALSCKCGKCNTDYSDCIHEAIKTNYCTKPQKSY

SEQ ID NO: 88 - protein, 379 aa, Artificial
  TSH beta fusion protein
GMGCSSPPCECHQEEDFRVTCKDIQRIPSLPPSTQTLKLIETHLRTIPSHAFSNLPNISRIYVSIDVTLQQLESHSFYNLSKVTHIEIRNTRNLTYIDPDALKELPLLKFLGIFNTGLKMFPDLTKVYSTDIFFILEITDNPYMTSIPVNAFQGLCNETLTLKLYNNGFTSVQGYAFNGTKLDAVYLNKNKYLTVIDKDAFGGVYSGPSLLLPLGRKSLSFETQKAPSSSTPGGGGSGGGGSGGNGTGGGGSGGGGSGGGGSGGGGSFCIPTEYTMHIERRECAYCLTINTTICAGYCMTRDINGKLFLPKYALSQDVCTYRDFIYRTVEIPGCPLHVAPYFSYPVALSCKCGKCNTDYSDCIHEAIKTNYCTKPQKSY

SEQ ID NO: 89 - protein, 545 aa, Artificial
  TSH beta fusion protein
GMGCSSPPCECHQEEDFRVTCKDIQRIPSLPPSTQTLKLIETHLRTIPSHAFSNLPNISRIYVSIDVTLQQLESHSFYNLSKVTHIEIRNTRNLTYIDPDALKELPLLKFLGIFNTGLKMFPDLTKVYSTDIFFILEITDNPYMTSIPVNAFQGLCNETLTLKLYNNGFTSVQGYAFNGTKLDAVYLNKNKYLTVIDKDAFGGVYSGPSLLDVSQTSVTALPSKGLEHLKELIARNTWTLKKLPLSLSFLHLTRADLSYPSHCCAFKNQKKIRGILESLMCNESSMQSLRQRKSVNALNSPLHQEYEENLGDSIVGYKEKSKFQDTHNNAHYYVFFEEQEDEIIGFGQELKNPQEETLQAFDSHYDYTICGDSEDMVCTPKSDEFNPCEDIMGGGGGSGGGGSGGNGTGGGGSGGGGSGGGGSGGGGSGGGGSFCIPTEYTMHIERRECAYCLTINTTICAGYCMTRDINGKLFLPKYALSQDVCTYRDFIYRTVEIPGCPLHVAPYFSYPVALSCKCGKCNTDYSDCIHEAIKTNYCTKPQKSY

SEQ ID NO: 90 - protein, 383 aa, Artificial
  TSH alpha fusion protein
GMGCSSPPCECHQEEDFRVTCKDIQRIPSLPPSTQTLKLIETHLRTIPSHAFSNLPNISRIYVSIDVTLQQLESHSFYNLSKVTHIEIRNTRNLTYIDPDALKELPLLKFLGIFNTGLKMFPDLTKVYSTDIFFILEITDNPYMTSIPVNAFQGLCNETLTLKLYNNGFTSVQGYAFNGTKLDAVYLNKNKYLTVIDKDAFGGVYSGPSLLDVSQTSVTALPSKGLEHLKELIARNTWTLKKLPLSLSFLHLTRADGGGGSGGGGSGGNGTGGGGSGGGGSGGGGSGGGGSAPDVQDCPECTLQENPFFSQPGAPILQCMGCCFSRAYPTPLRSKKTMLVQKNVTSESTCCVAKSYNRVTVMGGFKVENHTACHCSTCYYHKS

SEQ ID NO: 91 - protein, 359 aa, Artificial
  TSH alpha fusion protein
GMGCSSPPCECHQEEDFRVTCKDIQRIPSLPPSTQTLKLIETHLRTIPSHAFSNLPNISRIYVSIDVTLQQLESHSFYNLSKVTHIEIRNTRNLTYIDPDALKELPLLKFLGIFNTGLKMFPDLTKVYSTDIFFILEITDNPYMTSIPVNAFQGLCNETLTLKLYNNGFTSVQGYAFNGTKLDAVYLNKNKYLTVIDKDAFGGVYSGPSLLLPLGRKSLSFETQKAPSSSTPGGGGSGGGGSGGNGTGGGGSGGGGSGGGGSGGGGSAPDVQDCPECTLQENPFFSQPGAPILQCMGCCFSRAYPTPLRSKKTMLVQKNVTSESTCCVAKSYNRVTVMGGFKVENHTACHCSTCYYHKS

SEQ ID NO: 92 - protein, 520 aa, Artificial
  TSH alpha fusion protein
GMGCSSPPCECHQEEDFRVTCKDIQRIPSLPPSTQTLKLIETHLRTIPSHAFSNLPNISRIYVSIDVTLQQLESHSFYNLSKVTHIEIRNTRNLTYIDPDALKELPLLKFLGIFNTGLKMFPDLTKVYSTDIFFILEITDNPYMTSIPVNAFQGLCNETLTLKLYNNGFTSVQGYAFNGTKLDAVYLNKNKYLTVIDKDAFGGVYSGPSLLDVSQTSVTALPSKGLEHLKELIARNTWTLKKLPLSLSFLHLTRADLSYPSHCCAFKNQKKIRGILESLMCNESSMQSLRQRKSVNALNSPLHQEYEENLGDSIVGYKEKSKFQDTHNNAHYYVFFEEQEDEIIGFGQELKNPQEETLQAFDSHYDYTICGDSEDMVCTPKSDEFNPCEDIMGGGGGSGGGGSGGNGTGGGGSGGGGSGGGGSGGGGSAPDVQDCPECTLQENPFFSQPGAPILQCMGCCFSRAYPTPLRSKKTMLVQKNVTSESTCCVAKSYNRVTVMGGFKVENHTACHCSTCYYHKS

SEQ ID NO: 93 - protein, 525 aa, Artificial
  TSH alpha beta fusion protein
APDVQDCPECTLQENPFFSQPGAPILQCMGCCFSRAYPTPLRSKKTMLVQKNVTSESTCCVAKSYNRVTVMGGFKVENHTACHCSTCYYHKSGGGGSGGGGSGGGGSGGNGTGGGGSGGGGSGMGCSSPPCECHQEEDFRVTCKDIQRIPSLPPSTQTLKLIETHLRTIPSHAFSNLPNISRIYVSIDVTLQQLESHSFYNLSKVTHIEIRNTRNLTYIDPDALKELPLLKFLGIFNTGLKMFPDLTKVYSTDIFFILEITDNPYMTSIPVNAFQGLCNETLTLKLYNNGFTSVQGYAFNGTKLDAVYLNKNKYLTVIDKDAFGGVYSGPSLLDVSQTSVTALPSKGLEHLKELIARNTWTLKKLPLSLSFLHLTRADGGGGSGGGGSGGNGTGGGGSGGGGSGGGGSGGGGSFCIPTEYTMHIERRECAYCLTINTTICAGYCMTRDINGKLFLPKYALSQDVCTYRDFIYRTVEIPGCPLHVAPYFSYPVALSCKCGKCNTDYSDCIHEAIKTNYCTKPQKSY

SEQ ID NO: 94 - protein, 501 aa, Artificial
  TSH alpha beta fusion protein
APDVQDCPECTLQENPFFSQPGAPILQCMGCCFSRAYPTPLRSKKTMLVQKNVTSESTCCVAKSYNRVTVMGGFKVENHTACHCSTCYYHKSGGGGSGGGGSGGGGSGGNGTGGGGSGGGGSGMGCSSPPCECHQEEDFRVTCKDIQRIPSLPPSTQTLKLIETHLRTIPSHAFSNLPNISRIYVSIDVTLQQLESHSFYNLSKVTHIEIRNTRNLTYIDPDALKELPLLKFLGIFNTGLKMFPDLTKVYSTDIFFILEITDNPYMTSIPVNAFQGLCNETLTLKLYNNGFTSVQGYAFNGTKLDAVYLNKNKYLTVIDKDAFGGVYSGPSLLLPLGRKSLSFETQKAPSSSTPGGGGSGGGGSGGNGTGGGGSGGGGSGGGGSGGGGSFCIPTEYTMHIERRECAYCLTINTTICAGYCMTRDINGKLFLPKYALSQDVCTYRDFIYRTVEIPGCPLHVAPYFSYPVALSCKCGKCNTDYSDCIHEAIKTNYCTKPQKSY

SEQ ID NO: 95 - protein, 667 aa, Artificial
  TSH alpha beta fusion protein
APDVQDCPECTLQENPFFSQPGAPILQCMGCCFSRAYPTPLRSKKTMLVQKNVTSESTCCVAKSYNRVTVMGGFKVENHTACHCSTCYYHKSGGGGSGGGGSGGGGSGGNGTGGGGSGGGGSGMGCSSPPCECHQEEDFRVTCKDIQRIPSLPPSTQTLKLIETHLRTIPSHAFSNLPNISRIYVSIDVTLQQLESHSFYNLSKVTHIEIRNTRNLTYIDPDALKELPLLKFLGIFNTGLKMFPDLTKVYSTDIFFILEITDNPYMTSIPVNAFQGLCNETLTLKLYNNGFTSVQGYAFNGTKLDAVYLNKNKYLTVIDKDAFGGVYSGPSLLDVSQTSVTALPSKGLEHLKELIARNTWTLKKLPLSLSFLHLTRADLSYPSHCCAFKNQKKIRGILESLMCNESSMQSLRQRKSVNALNSPLHQEYEENLGDSIVGYKEKSKFQDTHNNAHYYVFFEEQEDEIIGFGQELKNPQEETLQAFDSHYDYTICGDSEDMVCTPKSDEFNPCEDIMGGGGGSGGGGSGGNGTGGGGSGGGGSGGGGSGGGGSGGGGSFCIPTEYTMHIERRECAYCLTINTTICAGYCMTRDINGKLFLPKYALSQDVCTYRDFIYRTVEIPGCPLHVAPYFSYPVALSCKCGKCNTDYSDCIHEAIKTNYCTKPQKSY

SEQ ID NO: 96 - protein, 530 aa, Artificial
  TSH alpha beta fusion protein
FCIPTEYTMHIERRECAYCLTINTTICAGYCMTRDINGKLFLPKYALSQDVCTYRDFIYRTVEIPGCPLHVAPYFSYPVALSCKCGKCNTDYSDCIHEAIKTNYCTKPQKSYGGGGSGGGGSGGGGSGGGGSGGNGTGGGGSGGGGSGMGCSSPPCECHQEEDFRVTCKDIQRIPSLPPSTQTLKLIETHLRTIPSHAFSNLPNISRIYVSIDVTLQQLESHSFYNLSKVTHIEIRNTRNLTYIDPDALKELPLLKFLGIFNTGLKMFPDLTKVYSTDIFFILEITDNPYMTSIPVNAFQGLCNETLTLKLYNNGFTSVQGYAFNGTKLDAVYLNKNKYLTVIDKDAFGGVYSGPSLLDVSQTSVTALPSKGLEHLKELIARNTWTLKKLPLSLSFLHLTRADGGGGSGGGGSGGNGTGGGGSGGGGSGGGGSGGGGSAPDVQDCPECTLQENPFFSQPGAPILQCMGCCFSRAYPTPLRSKKTMLVQKNVTSESTCCVAKSYNRVTVMGGFKVENHTACHCSTCYYHKS

SEQ ID NO: 97 - protein, 506 aa, Artificial
  TSH beta alpha fusion protein
FCIPTEYTMHIERRECAYCLTINTTICAGYCMTRDINGKLFLPKYALSQDVCTYRDFIYRTVEIPGCPLHVAPYFSYPVALSCKCGKCNTDYSDCIHEAIKTNYCTKPQKSYGGGGSGGGGSGGGGSGGGGSGGNGTGGGGSGGGGSGMGCSSPPCECHQEEDFRVTCKDIQRIPSLPPSTQTLKLIETHLRTIPSHAFSNLPNISRIYVSIDVTLQQLESHSFYNLSKVTHIEIRNTRNLTYIDPDALKELPLLKFLGIFNTGLKMFPDLTKVYSTDIFFILEITDNPYMTSIPVNAFQGLCNETLTLKLYNNGFTSVQGYAFNGTKLDAVYLNKNKYLTVIDKDAFGGVYSGPSLLLPLGRKSLSFETQKAPSSSTPGGGGSGGGGSGGNGTGGGGSGGGGSGGGGSGGGGSAPDVQDCPECTLQENPFFSQPGAPILQCMGCCFSRAYPTPLRSKKTMLVQKNVTSESTCCVAKSYNRVTVMGGFKVENHTACHCSTCYYHKS

SEQ ID NO: 98 - protein, 672 aa, Artificial
  TSH beta receptor alpha fusion protein
FCIPTEYTMHIERRECAYCLTINTTICAGYCMTRDINGKLFLPKYALSQDVCTYRDFIYRTVEIPGCPLHVAPYFSYPVALSCKCGKCNTDYSDCIHEAIKTNYCTKPQKSYGGGGSGGGGSGGGGSGGGGSGGNGTGGGGSGGGGSGMGCSSPPCECHQEEDFRVTCKDIQRIPSLPPSTQTLKLIETHLRTIPSHAFSNLPNISRIYVSIDVTLQQLESHSFYNLSKVTHIEIRNTRNLTYIDPDALKELPLLKFLGIFNTGLKMFPDLTKVYSTDIFFILEITDNPYMTSIPVNAFQGLCNETLTLKLYNNGFTSVQGYAFNGTKLDAVYLNKNKYLTVIDKDAFGGVYSGPSLLDVSQTSVTALPSKGLEHLKELIARNTWTLKKLPLSLSFLHLTRADLSYPSHCCAFKNQKKIRGILESLMCNESSMQSLRQRKSVNALNSPLHQEYEENLGDSIVGYKEKSKFQDTHNNAHYYVFFEEQEDEIIGFGQELKNPQEETLQAFDSHYDYTICGDSEDMVCTPKSDEFNPCEDIMGGGGGSGGGGSGGNGTGGGGSGGGGSGGGGSGGGGSGGGGSAPDVQDCPECTLQENPFFSQPGAPILQCMGCCFSRAYPTPLRSKKTMLVQKNVTSESTCCVAKSYNRVTVMGGFKVENHTACHCSTCYYHKS

SEQ ID NO: 99 - protein, 510 aa, Artificial
  TSH beta alpha fusion protein
FCIPTEYTMHIERRECAYCLTINTTICAGYCMTRDINGKLFLPKYALSQDVCTYRDFIYRTVEIPGCPLHVAPYFSYPVALSCKCGKCNTDYSDCIHEAIKTNYCTKPQKSYGGGGSGGGGSGWNGSGGGGSAPDVQDCPECTLQENPFFSQPGAPILQCMGCCFSRAYPTPLRSKKTMLVQKNVTSESTCCVAKSYNRVTVMGGFKVENHTACHCSTCYYHKSGGGGSGGGGSGGGGSGWNGSGGGGSGGGGSGMGCSSPPCECHQEEDFRVTCKDIQRIPSLPPSTQTLKLIETHLRTIPSHAFSNLPNISRIYVSIDVTLQQLESHSFYNLSKVTHIEIRNTRNLTYIDPDALKELPLLKFLGIFNTGLKMFPDLTKVYSTDIFFILEITDNPYMTSIPVNAFQGLCNETLTLKLYNNGFTSVQGYAFNGTKLDAVYLNKNKYLTVIDKDAFGGVYSGPSLLDVSQTSVTALPSKGLEHLKELIARNTWTLKKLPLSLSFLHLTRAD

SEQ ID NO: 100 - protein, 485 aa, Artificial
  TSH beta alpha fusion protein
FCIPTEYTMHIERRECAYCLTINTTICAGYCMTRDINGKLFLPKYALSQDVCTYRDFIYRTVEIPGCPLHVAPYFSYPVALSCKCGKCNTDYSDCIHEAIKTNYCTKPQKSYGGGGSGGGGSGWNGSGGGGSAPDVQDCPECTLQENPFFSQPGPILQCMGCCFSRAYPTPLRSKKTMLVQKNVTSESTCCVAKSYNRVTVMGGFKVENHTACHCSTCYYHKSGGGGSGGGGSGGGGSGWNGSGGGGSGGGGSGMGCSSPPCECHQEEDFRVTCKDIQRIPSLPPSTQTLKLIETHLRTIPSHAFSNLPNISRIYVSIDVTLQQLESHSFYNLSKVTHIEIRNTRNLTYIDPDALKELPLLKFLGIFNTGLKMFPDLTKVYSTDIFFILEITDNPYMTSIPVNAFQGLCNETLTLKLYNNGFTSVQGYAFNGTKLDAVYLNKNKYLTVIDKDAFGGVYSGPSLLLPLGRKSLSFETQKAPSSSTP

SEQ ID NO: 101 - protein, 646 aa, Artificial
  TSH beta alpha receptor fusion
FCIPTEYTMHIERRECAYCLTINTTICAGYCMTRDINGKLFLPKYALSQDVCTYRDFIYRTVEIPGCPLHVAPYFSYPVALSCKCGKCNTDYSDCIHEAIKTNYCTKPQKSYGGGGSGGGGSGWNGSGGGGSAPDVQDCPECTLQENPFFSQPGPILQCMGCCFSRAYPTPLRSKKTMLVQKNVTSESTCCVAKSYNRVTVMGGFKVENHTACHCSTCYYHKSGGGGSGGGGSGGGGSGWNGSGGGGSGGGGSGMGCSSPPCECHQEEDFRVTCKDIQRIPSLPPSTQTLKLIETHLRTIPSHAFSNLPNISRIYVSIDVTLQQLESHSFYNLSKVTHIEIRNTRNLTYIDPDALKELPLLKFLGIFNTGLKMFPDLTKVYSTDIFFILEITDNPYMTSIPVNAFQGLCNETLTLKLYNNGFTSVQGYAFNGTKLDAVYLNKNKYLTVIDKDAFGGVYSGPSLLDVSQTSVTALPSKGLEHLKELIARNTWTLKKLPLSLSFLHLTRADLSYPSHCCAFKNQKKIRGILESLMCNESSMQSLRQRKSVNALNSPLHQEYEENLGDSIVGYKEKSKFQDTHNNAHYYVFFEEQEDEIIGFGQELKNPQEETLQAFDSHYDYTICGDSEDMVCTPKSDEFNPCEDIMG

SEQ ID NO: 102 - protein, 515 aa, Artificial
  TSH alpha beta fusion protein
APDVQDCPECTLQENPFFSQPGAPILQCMGCCFSRAYPTPLRSKKTMLVQKNVTSESTCCVAKSYNRVTVMGGFKVENHTACHCSTCYYHKSGGGGSGGGGSGWNGSGGGGSFCIPTEYTMHIERRECAYCLTINTTICAGYCMTRDINGKLFLPKYALSQDVCTYRDFIYRTVEIPGCPLHVAPYFSYPVALSCKCGKCNTDYSDCIHEAIKTNYCTKPQKSYGGGGSGGGGSGGGGSGGGGSGWNGSGGGGSGGGGSGMGCSSPPCECHQEEDFRVTCKDIQRIPSLPPSTQTLKLIETHLRTIPSHAFSNLPNISRIYVSIDVTLQQLESHSFYNLSKVTHIEIRNTRNLTYIDPDALKELPLLKFLGIFNTGLKMFPDLTKVYSTDIFFILEITDNPYMTSIPVNAFQGLCNETLTLKLYNNGFTSVQGYAFNGTKLDAVYLNKNKYLTVIDKDAFGGVYSGPSLLDVSQTSVTALPSKGLEHLKELIARNTWTLKKLPLSLSFLHLTRAD

SEQ ID NO: 103 - protein, 491 aa, Artificial
  TSH alpha beta fusion protein
APDVQDCPECTLQENPFFSQPGAPILQCMGCCFSRAYPTPLRSKKTMLVQKNVTSESTCCVAKSYNRVTVMGGFKVENHTACHCSTCYYHKSGGGGSGGGGSGWNGSGGGGSFCIPTEYTMHIERRECAYCLTINTTICAGYCMTRDINGKLFLPKYALSQDVCTYRDFIYRTVEIPGCPLHVAPYFSYPVALSCKCGKCNTDYSDCIHEAIKTNYCTKPQKSYGGGGSGGGGSGGGGSGGGGSGWNGSGGGGSGGGGSGMGCSSPPCECHQEEDFRVTCKDIQRIPSLPPSTQTLKLIETHLRTIPSHAFSNLPNISRIYVSIDVTLQQLESHSFYNLSKVTHIEIRNTRNLTYIDPDALKELPLLKFLGIFNTGLKMFPDLTKVYSTDIFFILEITDNPYMTSIPVNAFQGLCNETLTLKLYNNGFTSVQGYAFNGTKLDAVYLNKNKYLTVIDKDAFGGVYSGPSLLLPLGRKSLSFETQKAPSSSTP

SEQ ID NO: 104 - protein, 651 aa, Artificial
  TSH alpha beta fusion protein
APDVQDCPECTLQENPFFSQPGAPILQCMGCCFSRAYPTPLRSKKTMLVQKNVTSESTCCVAKSYNRVTVMGGFKVENHTACHCSTCYYHKSGGGGSGGGGSGWNGSGGGGSFCIPTEYTMHIERRECAYCLTINTTICAGYCMTRDINGKLFLKYALSQDVCTYRDFIYRTVEIPGCPLHVAPYFSYPVALSCKCGKCNTDYSDCIHEAIKTNYCTKPQKSYGGGGSGGGGSGGGGSGGGGSGWNGSGGGGSGGGGSGMGCSSPPCECHQEEDFRVTCKDIQRIPSLPPSTQTLKLIETHLRTIPSHAFSNLPNISRIYVSIDVTLQQLESHSFYNLSKVTHIEIRNTRNLTYIDPDALKELPLLKFLGIFNTGLKMFPDLTKVYSTDIFFILEITDNPYMTSIPVNAFQGLCNETLTLKLYNNGFTSVQGYAFNGTKLDAVYLNKNKYLTVIDKDAFGGVYSGPSLLDVSQTSVTALPSKGLEHLKELIARNTWTLKKLPLSLSFLHLTRADLSYPSHCCAFKNQKKIRGILESLMCNESSMQSLRQRKSVNALNSPLHQEYEENLGDSIVGYKEKSKFQDTHNNAHYYVFFEEQEDEIIGFGQELKNPQEETLQAFDSHYDYTICGDSEDMVCTPKSDEFNPCEDIMG

SEQ ID NO: 105 - protein, 403 aa, Artificial
  TSH beta fusion protein
FCIPTEYTMHIERRECAYCLTINTTICAGYCMTRDINGKLFLPKYALSQDVCTYRDFIYRTVEIPGCPLHVAPYFSYPVALSCKCGKCNTDYSDCIHEAIKTNYCTKPQKSYGGGGSGGGGSGGGGSGGGGSGWNGSGGGGSGGGGSGMGCSSPPCECHQEEDFRVTCKDIQRIPSLPPSTQTLKLIETHLRTIPSHAFSNLPNISRIYVSIDVTLQQLESHSFYNLSKVTHIEIRNTRNLTYIDPDALKELPLLKFLGIFNTGLKMFPDLTKVYSTDIFFILEITDNPYMTSIPVNAFQGLCNETLTLKLYNNGFTSVQGYAFNGTKLDAVYLNKNKYLTVIDKDAFGGVYSGPSLLDVSQTSVTALPSKGLEHLKELIARNTWTLKKLPLSLSFLHLTRAD

SEQ ID NO: 106 - protein, 379 aa, Artificial
  TSH beta fusion protein
FCIPTEYTMHIERRECAYCLTINTTICAGYCMTRDINGKLFLPKYALSQDVCTYRDFIYRTVEIPGCPLHVAPYFSYPVALSCKCGKCNTDYSDCIHEAIKTNYCTKPQKSYGGGGSGGGGSGGGGSGGGGSGWNGSGGGGSGGGGSGMGCSSPPCECHQEEDFRVTCKDIQRIPSLPPSTQTLKLIETHLRTIPSHAFSNLPNISRIYVSIDVTLQQLESHSFYNLSKVTHIEIRNTRNLTYIDPDALKELPLLKFLGIFNTGLKMFPDLTKVYSTDIFFILEITDNPYMTSIPVNAFQGLCNETLTLKLYNNGFTSVQGYAFNGTKLDAVYLNKNKYLTVIDKDAFGGVYSGPSLLLPLGRKSLSFETQKAPSSSTP

SEQ ID NO: 107 - protein, 540 aa, Artificial
  TSH beta fusion protein
FCIPTEYTMHIERRECAYCLTINTTICAGYCMTRDINGKLFLPKYALSQDVCTYRDFIYRTVEIPGCPLHVAPYFSYPVALSCKCGKCNTDYSDCIHEAIKTNYCTKPQKSYGGGGSGGGGSGGGGSGGGGSGWNGSGGGGSGGGGSGMGCSSPPCECHQEEDFRVTCKDIQRIPSLPPSTQTLKLIETHLRTIPSHAFSNLPNISRIYVSIDVTLQQLESHSFYNLSKVTHIEIRNTRNLTYIDPDALKELPLLKFLGIFNTGLKMFPDLTKVYSTDIFFILEITDNPYMTSIPVNAFQGLCNETLTLKLYNNGFTSVQGYAFNGTKLDAVYLNKNKYLTVIDKDAFGGVYSGPSLLDVSQTSVTALPSKGLEHLKELIARNTWTLKKLPLSLSFLHLTRADLSYPSHCCAFKNQKKIRGILESLMCNESSMQSLRQRKSVNALNSPLHQEYEENLGDSIVGYKEKSKFQDTHNNAHYYVFFEEQEDEIIGFGQELKNPQEETLQAFDSHYDYTICGDSEDMVCTPKSDEFNPCEDIMG

SEQ ID NO: 108 - protein, 540 aa, Artificial; identical to SEQ ID NO: 107
  TSH beta fusion protein

SEQ ID NO: 109 - protein, 378 aa, Artificial
  TSH alpha fusion protein
APDVQDCPECTLQENPFFSQPGAPILQCMGCCFSRAYPTPLRSKKTMLVQKNVTSESTCCVAKSYNRVTVMGGFKVENHTACHCSTCYYHKSGGGGSGGGGSGGGGSGGGGSGWNGSGGGGSGMGCSSPPCECHQEEDFRVTCKDIQRIPSLPPSTQTLKLIETHLRTIPSHAFSNLPNISRIYVSIDVTLQQLESHSFYNLSKVTHIEIRNTRNLTYIDPDALKELPLLKFLGIFNTGLKMFPDLTKVYSTDIFFILEITDNPYMTSIPVNAFQGLCNETLTLKLYNNGFTSVQGYAFNGTKLDAVYLNKNKYLTVIDKDAFGGVYSGPSLLDVSQTSVTALPSKGLEHLKELIARNTWTLKKLPLSLSFLHLTRAD

SEQ ID NO: 110 - protein, 354 aa, Artificial
  TSH alpha receptor fusion protein
APDVQDCPECTLQENPFFSQPGAPILQCMGCCFSRAYPTPLRSKKTMLVQKNVTSESTCCVAKSYNRVTVMGGFKVENHTACHCSTCYYHKSGGGGSGGGGSGGGGSGGGGSGWNGSGGGGSGMGCSSPPCECHQEEDFRVTCKDIQRIPSLPPSTQTLKLIETHLRTIPSHAFSNLPNISRIYVSIDVTLQQLESHSFYNLSKVTHIEIRNTRNLTYIDPDALKELPLLKFLGIFNTGLKMFPDLTKVYSTDIFFILEITDNPYMTSIPVNAFQGLCNETLTLKLYNNGFTSVQGYAFNGTKLDAVYLNKNKYLTVIDKDAFGGVYSGPSLLLPLGRKSLSFETQKAPSSSTP

SEQ ID NO: 111 - protein, 515 aa, Artificial
  TSH alpha receptor fusion protein
APDVQDCPECTLQENPFFSQPGAPILQCMGCCFSRAYPTPLRSKKTMLVQKNVTSESTCCVAKSYNRVTVMGGFKVENHTACHCSTCYYHKSGGGGSGGGGSGGGGSGGGGSGWNGSGGGGSGMGCSSPPCECHQEEDFRVTCKDIQRIPSLPPSTQTLKLIETHLRTIPSHAFSNLPNISRIYVSIDVTLQQLESHSFYNLSKVTHIEIRNTRNLTYIDPDALKELPLLKFLGIFNTGLKMFPDLTKVYSTDIFFILEITDNPYMTSIPVNAFQGLCNETLTLKLYNNGFTSVQGYAFNGTKLDAVYLNKNKYLTVIDKDAFGGVYSGPSLLDVSQTSVTALPSKGLEHLKELIARNTWTLKKLPLSLSFLHLTRADLSYPSHCCAFKNQKKIRGILESLMCNESSMQSLRQRKSVNALNSPLHQEYEENLGDSIVGYKEKSKFQDTHNNAHYYVFFEEQEDEIIGFGQELKNPQEETLQAFDSHYDYTICGDSEDMVCTPKSDEFNPCEDIMG

SEQ ID NO: 112 - protein, 515 aa, Artificial
  TSH beta alpha fusion protein
GMGCSSPPCECHQEEDFRVTCKDIQRIPSLPPSTQTLKLIETHLRTIPSHAFSNLPNISRIYVSIDVTLQQLESHSFYNLSKVTHIEIRNTRNLTYIDPDALKELPLLKFLGIFNTGLKMFPDLTKVYSTDIFFILEITDNPYMTSIPVNAFQGLCNETLTLKLYNNGFTSVQGYAFNGTKLDAVYLNKNKYLTVIDKDAFGGVYSGPSLLDVSQTSVTALPSKGLEHLKELIARNTWTLKKLPLSLSFLHLTRADGGGGSGGGGSGWNGSGGGGSGGGGSGGGGSGGGGSFCIPTEYTMHIERRECAYCLTINTTICAGYCMTRDINGKLFLPKYALSQDVCTYRDFIYRTVEIPGCPLHVAPYFSYPVALSCKCGKCNTDYSDCIHEAIKTNYCTKPQKSYGGGGSGGGGSGWNGSGGGGSAPDVQDCPECTLQENPFFSQPGAPILQCMGCCFSRAYPTPLRSKKTMLVQKNVTSESTCCVAKSYNRVTVMGGFKVENHTACHCSTCYYHKS

SEQ ID NO: 113 - protein, 491 aa, Artificial
  TSH beta alpha fusion protein
GMGCSSPPCECHQEEDFRVTCKDIQRIPSLPPSTQTLKLIETHLRTIPSHAFSNLPNISRIYVSIDVTLQQLESHSFYNLSKVTHIEIRNTRNLTYIDPDALKELPLLKFLGIFNTGLKMFPDLTKVYSTDIFFILEITDNPYMTSIPVNAFQGLCNETLTLKLYNNGFTSVQGYAFNGTKLDAVYLNKNKYLTVIDKDAFGGVYSGPSLLLPLGRKSLSFETQKAPSSSTPGGGGSGGGGSGWNGSGGGGSGGGGSGGGGSGGGGSFCIPTEYTMHIERRECAYCLTINTTICAGYCMTRDINGKLFLPKYALSQDVCTYRDFIYRTVEIPGCPLHVAPYFSYPVALSCKCGKCNTDYSDCIHEAIKTNYCTKPQKSYGGGGSGGGGSGWNGSGGGGSAPDVQDCPECTLQENPFFSQPGAPILQCMGCCFSRAYPTPLRSKKTMLVQKNVTSESTCCVAKSYNRVTVMGGFKVENHTACHCSTCYYHKS

SEQ ID NO: 114 - protein, 657 aa, Artificial
  TSH beta alpha fusion protein
GMGCSSPPCECHQEEDFRVTCKDIQRIPSLPPSTQTLKLIETHLRTIPSHAFSNLPNISRIYVSIDVTLQQLESHSFYNLSKVTHIEIRNTRNLTYIDPDALKELPLLKFLGIFNTGLKMFPDLTKVYSTDIFFILEITDNPYMTSIPVNAFQGLCNETLTLKLYNNGFTSVQGYAFNGTKLDAVYLNKNKYLTVIDKDAFGGVYSGPSLLDVSQTSVTALPSKGLEHLKELIARNTWTLKKLPLSLSFLHLTRADLSYPSHCCAFKNQKKIRGILESLMCNESSMQSLRQRKSVNALNSPLHQEYEENLGDSIVGYKEKSKFQDTHNNAHYYVFFEEQEDEIIGFGQELKNPQEETLQAFDSHYDYTICGDSEDMVCTPKSDEFNPCEDIMGGGGGSGGGGSGGGGSGGGGSGGGGSGWNGSGGGGSGGGGSFCIPTEYTMHIERRECAYCLTINTTICAGYCMTRDINGKLFLPKYALSQDVCTYRDFIYRTVEIPGCPLHVAPYFSYPVALSCKCGKCNTDYSDCIHEAIKTNYCTKPQKSYGGGGSGGGGSGWNGSGGGGSAPDVQDCPECTLQENPFFSQPGAPILQCMGCCFSRAYPTPLRSKKTMLVQKNVTSESTCCVAKSYNRVTVMGGFKVENHTACHCSTCYYHKS

SEQ ID NO: 115 - protein, 515 aa, Artificial
  TSH alpha beta fusion protein
GMGCSSPPCECHQEEDFRVTCKDIQRIPSLPPSTQTLKLIETHLRTIPSHAFSNLPNISRIYVSIDVTLQQLESHSFYNLSKVTHIEIRNTRNLTYIDPDALKELPLLKFLGIFNTGLKMFPDLTKVYSTDIFFILEITDNPYMTSIPVNAFQGLCNETLTLKLYNNGFTSVQGYAFNGTKLDAVYLNKNKYLTVIDKDAFGGVYSGPSLLDVSQTSVTALPSKGLEHLKELIARNTWTLKKLPLSLSFLHLTRADGGGGSGGGGSGWNGSGGGGSGGGGSGGGGSGGGGSAPDVQDCPECTLQENPFFSQPGAPILQCMGCCFSRAYPTPLRSKKTMLVQKNVTSESTCCVAKSYNRVTVMGGFKVENHTACHCSTCYYHKSGGGGSGGGGSGWNGSGGGGSFCIPTEYTMHIERRECAYCLTINTTICAGYCMTRDINGKLFLPKYALSQDVCTYRDFIYRTVEIPGCPLHVAPYFSYPVALSCKCGKCNTDYSDCIHEAIKTNYCTKPQKSY

SEQ ID NO: 116 - protein, 491 aa, Artificial
  TSH alpha beta fusion
GMGCSSPPCECHQEEDFRVTCKDIQRIPSLPPSTQTLKLIETHLRTIPSHAFSNLPNISRIYVSIDVTLQQLESHSFYNLSKVTHIEIRNTRNLTYIDPDALKELPLLKFLGIFNTGLKMFPDLTKVYSTDIFFILEITDNPYMTSIPVNAFQGLCNETLTLKLYNNGFTSVQGYAFNGTKLDAVYLNKNKYLTVIDKDAFGGVYSGPSLLLPLGRKSLSFETQKAPSSSTPGGGGSGGGGSGWNGSGGGGSGGGGSGGGGSGGGGSAPDVQDCPECTLQENPFFSQPGAPILQCMGCCFSRAYPTPLRSKKTMLVQKNVTSESTCCVAKSYNRVTVMGGFKVENHTACHCSTCYYHKSGGGGSGGGGSGWNGSGGGGSFCIPTEYTMHIERRECAYCLTINTTICAGYCMTRDINGKLFLPKYALSQDVCTYRDFIYRTVEIPGCPLHVAPYFSYPVALSCKCGKCNTDYSDCIHEAIKTNYCTKPQKSY

SEQ ID NO: 117 - protein, 657 aa, Artificial
  TSH alpha beta fusion protein
GMGCSSPPCECHQEEDFRVTCKDIQRIPSLPPSTQTLKLIETHLRTIPSHAFSNLPNISRIYVSIDVTLQQLESHSFYNLSKVTHIEIRNTRNLTYIDPDALKELPLLKFLGIFNTGLKMFPDLTKVYSTDIFFILEITDNPYMTSIPVNAFQGLCNETLTLKLYNNGFTSVQGYAFNGTKLDAVYLNKNKYLTVIDKDAFGGVYSGPSLLDVSQTSVTALPSKGLEHLKELIARNTWTLKKLPLSLSFLHLTRADLSYPSHCCAFKNQKKIRGILESLMCNESSMQSLRQRKSVNALNSPLHQEYEENLGDSIVGYKEKSKFQDTHNNAHYYVFFEEQEDEIIGFGQELKNPQEETLQAFDSHYDYTICGDSEDMVCTPKSDEFNPCEDIMGGGGGSGGGGSGWNGSGGGGSGGGGSGGGGSGGGGSGGGGSAPDVQDCPECTLQENPFFSQPGAPILQCMGCCFSRAYPTPLRSKKTMLVQKNVTSESTCCVAKSYNRVTVMGGFKVENHTACHCSTCYYHKSGGGGSGGGGSGWNGSGGGGSFCIPTEYTMHIERRECAYCLTINTTICAGYCMTRDINGKLFLPKYALSQDVCTYRDFIYRTVEIPGCPLHVAPYFSYPVALSCKCGKCNTDYSDCIHEAIKTNYCTKPQKSY

SEQ ID NO: 118 - protein, 403 aa, Artificial
  TSH beta receptor fusion protein
GMGCSSPPCECHQEEDFRVTCKDIQRIPSLPPSTQTLKLIETHLRTIPSHAFSNLPNISRIYVSIDVTLQQLESHSFYNLSKVTHIEIRNTRNLTYIDPDALKELPLLKFLGIFNTGLKMFPDLTKVYSTDIFFILEITDNPYMTSIPVNAFQGLCNETLTLKLYNNGFTSVQGYAFNGTKLDAVYLNKNKYLTVIDKDAFGGVYSGPSLLDVSQTSVTALPSKGLEHLKELIARNTWTLKKLPLSLSFLHLTRADGGGGSGGGGSGWNGSGGGGSGGGGSGGGGSGGGGSFCIPTEYTMHIERRECAYCLTINTTICAGYCMTRDINGKLFLPKYALSQDVCTYRDFIYRTVEIPGCPLHVAPYFSYPVALSCKCGKCNTDYSDCIHEAIKTNYCTKPQKSY

SEQ ID NO: 119 - protein, 491 aa, Artificial; identical to SEQ ID NO: 116
  TSH beta fusion protein

SEQ ID NO: 120 - protein, 657 aa, Artificial; identical to SEQ ID NO: 117
  TSH beta fusion protein

SEQ ID NO: 121 - protein, 383 aa, Artificial
  TSH alpha receptor fusion protein
GMGCSSPPCECHQEEDFRVTCKDIQRIPSLPPSTQTLKLIETHLRTIPSHAFSNLPNISRIYVSIDVTLQQLESHSFYNLSKVTHIEIRNTRNLTYIDPDALKELPLLKFLGIFNTGLKMFPDLTKVYSTDIFFILEITDNPYMTSIPVNAFQGLCNETLTLKLYNNGFTSVQGYAFNGTKLDAVYLNKNKYLTVIDKDAFGGVYSGPSLLDVSQTSVTALPSKGLEHLKELIARNTWTLKKLPLSLSFLHLTRADGGGGSGGGGSGWNGSGGGGSGGGGSGGGGSGGGGSAPDVQDCPECTLQENPFFSQPGAPILQCMGCCFSRAYPTPLRSKKTMLVQKNVTSESTCCVAKSYNRVTVMGGFKVENHTACHCSTCYYHKS

SEQ ID NO: 122 - protein, 359 aa, Artificial
  TSH alpha fusion protein
GMGCSSPPCECHQEEDFRVTCKDIQRIPSLPPSTQTLKLIETHLRTIPSHAFSNLPNISRIYVSIDVTLQQLESHSFYNLSKVTHIEIRNTRNLTYIDPDALKELPLLKFLGIFNTGLKMFPDLTKVYSTDIFFILEITDNPYMTSIPVNAFQGLCNETLTLKLYNNGFTSVQGYAFNGTKLDAVYLNKNKYLTVIDKDAFGGVYSGPSLLLPLGRKSLSFETQKAPSSSTPGGGGSGGGGSGWNGSGGGGSGGGGSGGGGSGGGGSAPDVQDCPECTLQENPFFSQPGAPILQCMGCCFSRAYPTPLRSKKTMLVQKNVTSESTCCVAKSYNRVTVMGGFKVENHTACHCSTCYYHKS

SEQ ID NO: 123 - protein, 520 aa, Artificial
  TSH alpha fusion protein
GMGCSSPPCECHQEEDFRVTCKDIQRIPSLPPSTQTLKLIETHLRTIPSHAFSNLPNISRIYVSIDVTLQQLESHSFYNLSKVTHIEIRNTRNLTYIDPDALKELPLLKFLGIFNTGLKMFPDLTKVYSTDIFFILEITDNPYMTSIPVNAFQGLCNETLTLKLYNNGFTSVQGYAFNGTKLDAVYLNKNKYLTVIDKDAFGGVYSGPSLLDVSQTSVTALPSKGLEHLKELIARNTWTLKKLPLSLSFLHLTRADLSYPSHCCAFKNQKKIRGILESLMCNESSMQSLRQRKSVNALNSPLHQEYEENLGDSIVGYKEKSKFQDTHNNAHYYVFFEEQEDEIIGFGQELKNPQEETLQAFDSHYDYTICGDSEDMVCTPKSDEFNPCEDIMGGGGGSGGGGSGWNGSGGGGSGGGGSGGGGSGGGGSAPDVQDCPECTLQENPFFSQPGAPILQCMGCCFSRAYPTPLRSKKTMLVQKNVTSESTCCVAKSYNRVTVMGGFKVENHTACHCSTCYYHKS

SEQ ID NO: 124 - protein, 525 aa, Artificial
  TSH alpha beta fusion protein
APDVQDCPECTLQENPFFSQPGAPILQCMGCCFSRAYPTPLRSKKTMLVQKNVTSESTCCVAKSYNRVTVMGGFKVENHTACHCSTCYYHKSGGGGSGGGGSGGGGSGWNGSGGGGSGGGGSGMGCSSPPCECHQEEDFRVTCKDIQRIPSLPPSTQTLKLIETHLRTIPSHAFSNLPNISRIYVSIDVTLQQLESHSFYNLSKVTHIEIRNTRNLTYIDPDALKELPLLKFLGIFNTGLKMFPDLTKVYSTDIFFILEITDNPYMTSIPVNAFQGLCNETLTLKLYNNGFTSVQGYAFNGTKLDAVYLNKNKYLTVIDKDAFGGVYSGPSLLDVSQTSVTALPSKGLEHLKELIARNTWTLKKLPLSLSFLHLTRADGGGGSGGGGSGWNGSGGGGSGGGGSGGGGSGGGGSFCIPTEYTMHIERRECAYCLTINTTICAGYCMTRDINGKLFLPKYALSQDVCTYRDFIYRTVEIPGCPLHVAPYFSYPVALSCKCGKCNTDYSDCIHEAIKTNYCTKPQKSY

SEQ ID NO: 125 - protein, 501 aa, Artificial
  TSH alpha beta fusion protein
APDVQDCPECTLQENPFFSQPGAPILQCMGCCFSRAYPTPLRSKKTMLVQKNVTSESTCCVAKSYNRVTVMGGFKVENHTACHCSTCYYHKSGGGGSGGGGSGGGGSGWNGSGGGGSGGGGSGMGCSSPPCECHQEEDFRVTCKDIQRIPSLPPSTQTLKLIETHLRTIPSHAFSNLPNISRIYVSIDVTLQQLESHSFYNLSKVTHIEIRNTRNLTYIDPDALKELPLLKFLGIFNTGLKMFPDLTKVYSTDIFFILEITDNPYMTSIPVNAFQGLCNETLTLKLYNNGFTSVQGYAFNGTKLDAVYLNKNKYLTVIDKDAFGGVYSGPSLLLPLGRKSLSFETQKAPSSSTPGGGGSGGGGSGWNGSGGGGSGGGGSGGGGSGGGGSFCIPTEYTMHIERRECAYCLTINTTICAGYCMTRDINGKLFLPKYALSQDVCTYRDFIYRTVEIPGCPLHVAPYFSYPVALSCKCGKCNTDYSDCIHEAIKTNYCTKPQKSY

SEQ ID NO: 126 - protein, 667 aa, Artificial
  TSH alpha beta fusion protein
APDVQDCPECTLQENPFFSQPGAPILQCMGCCFSRAYPTPLRSKKTMLVQKNVTSESTCCVAKSYNRVTVMGGFKVENHTACHCSTCYYHKSGGGGSGGGGSGGGGSGWNGSGGGGSGGGGSGMGCSSPPCECHQEEDFRVTCKDIQRIPSLPPSTQTLKLIETHLRTIPSHAFSNLPNISRIYVSIDVTLQQLESHSFYNLSKVTHIEIRNTRNLTYIDPDALKELPLLKFLGIFNTGLKMFPDLTKVYSTDIFFILEITDNPYMTSIPVNAFQGLCNETLTLKLYNNGFTSVQGYAFNGTKLDAVYLNKNKYLTVIDKDAFGGVYSGPSLLDVSQTSVTALPSKGLEHLKELIARNTWTLKKLPLSLSFLHLTRADLSYPSHCCAFKNQKKIRGILESLMCNESSMQSLRQRKSVNALNSPLHQEYEENLGDSIVGYKEKSKFQDTHNNAHYYVFFEEQEDEIIGFGQELKNPQEETLQAFDSHYDYTICGDSEDMVCTPKSDEFNPCEDIMGGGGGSGGGGSGWNGSGGGGSGGGGSGGGGSGGGGSGGGGSFCIPTEYTMHIERRECAYCLTINTTICAGYCMTRDINGKLFLPKYALSQDVCTYRDFIYRTVEIPGCPLHVAPYFSYPVALSCKCGKCNTDYSDCIHEAIKTNYCTKPQKSY

SEQ ID NO: 127 - protein, 530 aa, Artificial
  TSH alpha beta fusion protein
FCIPTEYTMHIERRECAYCLTINTTICAGYCMTRDINGKLFLPKYALSQDVCTYRDFIYRTVEIPGCPLHVAPYFSYPVALSCKCGKCNTDYSDCIHEAIKTNYCTKPQKSYGGGGSGGGGSGGGGSGGGGSGWNGSGGGGSGGGGSGMGCSSPPCECHQEEDFRVTCKDIQRIPSLPPSTQTLKLIETHLRTIPSHAFSNLPNISRIYVSIDVTLQQLESHSFYNLSKVTHIEIRNTRNLTYIDPDALKELPLLKFLGIFNTGLKMFPDLTKVYSTDIFFILEITDNPYMTSIPVNAFQGLCNETLTLKLYNNGFTSVQGYAFNGTKLDAVYLNKNKYLTVIDKDAFGGVYSGPSLLDVSQTSVTALPSKGLEHLKELIARNTWTLKKLPLSLSFLHLTRADGGGGSGGGGSGWNGSGGGGSGGGGSGGGGSGGGGSAPDVQDCPECTLQENPFFSQPGAPILQCMGCCFSRAYPTPLRSKKTMLVQKNVTSESTCCVAKSYNRVTVMGGFKVENHTACHCSTCYYHKS

SEQ ID NO: 128 - protein, 506 aa, Artificial
  TSH alpha beta fusion protein
FCIPTEYTMHIERRECAYCLTINTTICAGYCMTRDINGKLFLPKYALSQDVCTYRDFIYRTVEIPGCPLHVAPYFSYPVALSCKCGKCNTDYSDCIHEAIKTNYCTKPQKSYGGGGSGGGGSGGGGSGGGGSGWNGSGGGGSGGGGSGMGCSSPPCECHQEEDFRVTCKDIQRIPSLPPSTQTLKLIETHLRTIPSHAFSNLPNISRIYVSIDVTLQQLESHSFYNLSKVTHIEIRNTRNLTYIDPDALKELPLLKFLGIFNTGLKMFPDLTKVYSTDIFFILEITDNPYMTSIPVNAFQGLCNETLTLKLYNNGFTSVQGYAFNGTKLDAVYLNKNKYLTVIDKDAFGGVYSGPSLLLPLGRKSLSFETQKAPSSSTPGGGGSGGGGSGWNGSGGGGSGGGGSGGGGSGGGGSAPDVQDCPECTLQENPFFSQPGAPILQCMGCCFSRAYPTPLRSKKTMLVQKNVTSESTCCVAKSYNRVTVMGGFKVENHTACHCSTCYYHKS

SEQ ID NO: 129 - protein, 672 aa, Artificial
  TSH alpha beta fusion protein
FCIPTEYTMHIERRECAYCLTINTTICAGYCMTRDINGKLFLPKYALSQDVCTYRDFIYRTVEIPGCPLHVAPYFSYPVALSCKCGKCNTDYSDCIHEAIKTNYCTKPQKSYGGGGSGGGGSGGGGSGGGGSGWNGSGGGGSGGGGSGMGCSSPPCECHQEEDFRVTCKDIQRIPSLPPSTQTLKLIETHLRTIPSHAFSNLPNISRIYVSIDVTLQQLESHSFYNLSKVTHIEIRNTRNLTYIDPDALKELPLLKFLGIFNTGLKMFPDLTKVYSTDIFFILEITDNPYMTSIPVNAFQGLCNETLTLKLYNNGFTSVQGYAFNGTKLDAVYLNKNKYLTVIDKDAFGGVYSGPSLLDVSQTSVTALPSKGLEHLKELIARNTWTLKKLPLSLSFLHLTRADLSYPSHCCAFKNQKKIRGILESLMCNESSMQSLRQRKSVNALNSPLHQEYEENLGDSIVGYKEKSKFQDTHNNAHYYVFFEEQEDEIIGFGQELKNPQEETLQAFDSHYDYTICGDSEDMVCTPKSDEFNPCEDIMGGGGGSGGGGSGWNGSGGGGSGGGGSGGGGSGGGGSGGGGSAPDVQDCPECTLQENPFFSQPGAPILQCMGCCFSRAYPTPLRSKKTMLVQKNVTSESTCCVAKSYNRVTVMGGFKVENHTACHCSTCYYHKS

SEQ ID NO: 130 - protein, 516 aa, Artificial
  TSH beta alpha receptor fusion
FCIPTEYTMHIERRECAYCLTINTTICAGYCMTRDINGKLFLPKYALSQDVCTYRDFIYRTVEIPGCPLHVAPYFSYPVALSCKCGKCNTDYSDCIHEAIKTNYCTKPQKSYGGGGSGGGGSGGGGSNATGGGGSAPDVQDCPECTLQENPFFSQPGAPILQCMGCCFSRAYPTPLRSKKTMLVQKNVTSESTCCVAKSYNRVTVMGGFKVENHTACHCSTCYYHKSGGGGSGGGGSGGGGSGGGGSNATGGGGSGGGGSGMGCSSPPCECHQEEDFRVTCKDIQRIPSLPPSTQTLKLIETHLRTIPSHAFSNLPNISRIYVSIDVTLQQLESHSFYNLSKVTHIEIRNTRNLTYIDPDALKELPLLKFLGIFNTGLKMFPDLTKVYSTDIFFILEITDNPYMTSIPVNAFQGLCNETLTLKLYNNGFTSVQGYAFNGTKLDAVYLNKNKYLTVIDKDAFGGVYSGPSLLDVSQTSVTALPSKGLEHLKELIARNTWTLKKLPLSLSFLHLTRAD

SEQ ID NO: 131 - protein, 491 aa, Artificial
  TSH beta alpha fusion protein
FCIPTEYTMHIERRECAYCLTINTTICAGYCMTRDINGKLFLPKYALSQDVCTYRDFIYRTVEIPGCPLHVAPYFSYPVALSCKCGKCNTDYSDCIHEAIKTNYCTKPQKSYGGGGSGGGGSGGGGSNATGGGGSAPDVQDCPECTLQENPFFSQPGPILQCMGCCFSRAYPTPLRSKKTMLVQKNVTSESTCCVAKSYNRVTVMGGFKVENHTACHCSTCYYHKSGGGGSGGGGSGGGGSGGGGSNATGGGGSGGGGSGMGCSSPPCECHQEEDFRVTCKDIQRIPSLPPSTQTLKLIETHLRTIPSHAFSNLPNISRIYVSIDVTLQQLESHSFYNLSKVTHIEIRNTRNLTYIDPDALKELPLLKFLGIFNTGLKMFPDLTKVYSTDIFFILEITDNPYMTSIPVNAFQGLCNETLTLKLYNNGFTSVQGYAFNGTKLDAVYLNKNKYLTVIDKDAFGGVYSGPSLLLPLGRKSLSFETQKAPSSSTP

SEQ ID NO: 132 - protein, 652 aa, Artificial
  TSH beta alpha fusion protein
FCIPTEYTMHIERRECAYCLTINTTICAGYCMTRDINGKLFLPKYALSQDVCTYRDFIYRTVEIPGCPLHVAPYFSYPVALSCKCGKCNTDYSDCIHEAIKTNYCTKPQKSYGGGGSGGGGSGGGGSNATGGGGSAPDVQDCPECTLQENPFFSQPGPILQCMGCCFSRAYPTPLRSKKTMLVQKNVTSESTCCVAKSYNRVTVMGGFKVENHTACHCSTCYYHKSGGGGSGGGGSGGGGSGGGGSNATGGGGSGGGGSGMGCSSPPCECHQEEDFRVTCKDIQRIPSLPPSTQTLKLIETHLRTIPSHAFSNLPNISRIYVSIDVTLQQLESHSFYNLSKVTHIEIRNTRNLTYIDPDALKELPLLKFLGIFNTGLKMFPDLTKVYSTDIFFILEITDNPYMTSIPVNAFQGLCNETLTLKLYNNGFTSVQGYAFNGTKLDAVYLNKNKYLTVIDKDAFGGVYSGPSLLDVSQTSVTALPSKGLEHLKELIARNTWTLKKLPLSLSFLHLTRADLSYPSHCCAFKNQKKIRGILESLMCNESSMQSLRQRKSVNALNSPLHQEYEENLGDSIVGYKEKSKFQDTHNNAHYYVFFEEQEDEIIGFGQELKNPQEETLQAFDSHYDYTICGDSEDMVCTPKSDEFNPCEDIMG

SEQ ID NO: 133 - protein, 521 aa, Artificial
  TSH alpha beta fusion protein
APDVQDCPECTLQENPFFSQPGAPILQCMGCCFSRAYPTPLRSKKTMLVQKNVTSESTCCVAKSYNRVTVMGGFKVENHTACHCSTCYYHKSGGGGSGGGGSGGGGSNATGGGGSFCIPTEYTMHIERRECAYCLTINTTICAGYCMTRDINGKLFLPKYALSQDVCTYRDFIYRTVEIPGCPLHVAPYFSYPVALSCKCGKCNTDYSDCIHEAIKTNYCTKPQKSYGGGGSGGGGSGGGGSGGGGSGGGGSNATGGGGSGGGGSGMGCSSPPCECHQEEDFRVTCKDIQRIPSLPPSTQTLKLIETHLRTIPSHAFSNLPNISRIYVSIDVTLQQLESHSFYNLSKVTHIEIRNTRNLTYIDPDALKELPLLKFLGIFNTGLKMFPDLTKVYSTDIFFILEITDNPYMTSIPVNAFQGLCNETLTLKLYNNGFTSVQGYAFNGTKLDAVYLNKNKYLTVIDKDAFGGVYSGPSLLDVSQTSVTALPSKGLEHLKELIARNTWTLKKLPLSLSFLHLTRAD

SEQ ID NO: 134 - protein, 497 aa, Artificial
  TSH alpha beta receptor fusion protein
APDVQDCPECTLQENPFFSQPGAPILQCMGCCFSRAYPTPLRSKKTMLVQKNVTSESTCCVAKSYNRVTVMGGFKVENHTACHCSTCYYHKSGGGGSGGGGSGGGGSNATGGGGSFCIPTEYTMHIERRECAYCLTINTTICAGYCMTRDINGKLFLPKYALSQDVCTYRDFIYRTVEIPGCPLHVAPYFSYPVALSCKCGKCNTDYSDCIHEAIKTNYCTKPQKSYGGGGSGGGGSGGGGSGGGGSGGGGSNATGGGGSGGGGSGMGCSSPPCECHQEEDFRVTCKDIQRIPSLPPSTQTLKLIETHLRTIPSHAFSNLPNISRIYVSIDVTLQQLESHSFYNLSKVTHIEIRNTRNLTYIDPDALKELPLLKFLGIFNTGLKMFPDLTKVYSTDIFFILEITDNPYMTSIPVNAFQGLCNETLTLKLYNNGFTSVQGYAFNGTKLDAVYLNKNKYLTVIDKDAFGGVYSGPSLLLPLGRKSLSFETQKAPSSSTP

SEQ ID NO: 135 - protein, 657 aa, Artificial
  TSH alpha beta fusion protein
APDVQDCPECTLQENPFFSQPGAPILQCMGCCFSRAYPTPLRSKKTMLVQKNVTSESTCCVAKSYNRVTVMGGFKVENHTACHCSTCYYHKSGGGGSGGGGSGGGGSNATGGGGSFCIPTEYTMHIERRECAYCLTINTTICAGYCMTRDINGKLFLKYALSQDVCTYRDFIYRTVEIPGCPLHVAPYFSYPVALSCKCGKCNTDYSDCIHEAIKTNYCTKPQKSYGGGGSGGGGSGGGGSGGGGSGGGGSNATGGGGSGGGGSGMGCSSPPCECHQEEDFRVTCKDIQRIPSLPPSTQTLKLIETHLRTIPSHAFSNLPNISRIYVSIDVTLQQLESHSFYNLSKVTHIEIRNTRNLTYIDPDALKELPLLKFLGIFNTGLKMFPDLTKVYSTDIFFILEITDNPYMTSIPVNAFQGLCNETLTLKLYNNGFTSVQGYAFNGTKLDAVYLNKNKYLTVIDKDAFGGVYSGPSLLDVSQTSVTALPSKGLEHLKELIARNTWTLKKLPLSLSFLHLTRADLSYPSHCCAFKNQKKIRGILESLMCNESSMQSLRQRKSVNALNSPLHQEYEENLGDSIVGYKEKSKFQDTHNNAHYYVFFEEQEDEIIGFGQELKNPQEETLQAFDSHYDYTICGDSEDMVCTPKSDEFNPCEDIMG

SEQ ID NO: 136 - protein, 406 aa, Artificial
  TSH beta fusion protein
FCIPTEYTMHIERRECAYCLTINTTICAGYCMTRDINGKLFLPKYALSQDVCTYRDFIYRTVEIPGCPLHVAPYFSYPVALSCKCGKCNTDYSDCIHEAIKTNYCTKPQKSYGGGGSGGGGSGGGGSGGGGSGGGGSNATGGGGSGGGGSGMGCSSPPCECHQEEDFRVTCKDIQRIPSLPPSTQTLKLIETHLRTIPSHAFSNLPNISRIYVSIDVTLQQLESHSFYNLSKVTHIEIRNTRNLTYIDPDALKELPLLKFLGIFNTGLKMFPDLTKVYSTDIFFILEITDNPYMTSIPVNAFQGLCNETLTLKLYNNGFTSVQGYAFNGTKLDAVYLNKNKYLTVIDKDAFGGVYSGPSLLDVSQTSVTALPSKGLEHLKELIARNTWTLKKLPLSLSFLHLTRAD

SEQ ID NO: 137 - protein, 382 aa, Artificial
  TSH beta fusion protein
FCIPTEYTMHIERRECAYCLTINTTICAGYCMTRDINGKLFLPKYALSQDVCTYRDFIYRTVEIPGCPLHVAPYFSYPVALSCKCGKCNTDYSDCIHEAIKTNYCTKPQKSYGGGGSGGGGSGGGGSGGGGSGGGGSNATGGGGSGGGGSGMGCSSPPCECHQEEDFRVTCKDIQRIPSLPPSTQTLKLIETHLRTIPSHAFSNLPNISRIYVSIDVTLQQLESHSFYNLSKVTHIEIRNTRNLTYIDPDALKELPLLKFLGIFNTGLKMFPDLTKVYSTDIFFILEITDNPYMTSIPVNAFQGLCNETLTLKLYNNGFTSVQGYAFNGTKLDAVYLNKNKYLTVIDKDAFGGVYSGPSLLLPLGRKSLSFETQKAPSSSTP

SEQ ID NO: 138 - protein, 543 aa, Artificial
  TSH beta fusion protein
FCIPTEYTMHIERRECAYCLTINTTICAGYCMTRDINGKLFLPKYALSQDVCTYRDFIYRTVEIPGCPLHVAPYFSYPVALSCKCGKCNTDYSDCIHEAIKTNYCTKPQKSYGGGGSGGGGSGGGGSGGGGSGGGGSNATGGGGSGGGGSGMGCSSPPCECHQEEDFRVTCKDIQRIPSLPPSTQTLKLIETHLRTIPSHAFSNLPNISRIYVSIDVTLQQLESHSFYNLSKVTHIEIRNTRNLTYIDPDALKELPLLKFLGIFNTGLKMFPDLTKVYSTDIFFILEITDNPYMTSIPVNAFQGLCNETLTLKLYNNGFTSVQGYAFNGTKLDAVYLNKNKYLTVIDKDAFGGVYSGPSLLDVSQTSVTALPSKGLEHLKELIARNTWTLKKLPLSLSFLHLTRADLSYPSHCCAFKNQKKIRGILESLMCNESSMQSLRQRKSVNALNSPLHQEYEENLGDSIVGYKEKSKFQDTHNNAHYYVFFEEQEDEIIGFGQELKNPQEETLQAFDSHYDYTICGDSEDMVCTPKSDEFNPCEDIMG

SEQ ID NO: 139 - protein, 381 aa, Artificial
  TSH alpha fusion protein
APDVQDCPECTLQENPFFSQPGAPILQCMGCCFSRAYPTPLRSKKTMLVQKNVTSESTCCVAKSYNRVTVMGGFKVENHTACHCSTCYYHKSGGGGSGGGGSGGGGSGGGGSGGGGSNATGGGGSGMGCSSPPCECHQEEDFRVTCKDIQRIPSLPPSTQTLKLIETHLRTIPSHAFSNLPNISRIYVSIDVTLQQLESHSFYNLSKVTHIEIRNTRNLTYIDPDALKELPLLKFLGIFNTGLKMFPDLTKVYSTDIFFILEITDNPYMTSIPVNAFQGLCNETLTLKLYNNGFTSVQGYAFNGTKLDAVYLNKNKYLTVIDKDAFGGVYSGPSLLDVSQTSVTALPSKGLEHLKELIARNTWTLKKLPLSLSFLHLTRAD

SEQ ID NO: 140 - protein, 357 aa, Artificial
  TSH alpha fusion protein
APDVQDCPECTLQENPFFSQPGAPILQCMGCCFSRAYPTPLRSKKTMLVQKNVTSESTCCVAKSYNRVTVMGGFKVENHTACHCSTCYYHKSGGGGSGGGGSGGGGSGGGGSGGGGSNATGGGGSGMGCSSPPCECHQEEDFRVTCKDIQRIPSLPPSTQTLKLIETHLRTIPSHAFSNLPNISRIYVSIDVTLQQLESHSFYNLSKVTHIEIRNTRNLTYIDPDALKELPLLKFLGIFNTGLKMFPDLTKVYSTDIFFILEITDNPYMTSIPVNAFQGLCNETLTLKLYNNGFTSVQGYAFNGTKLDAVYLNKNKYLTVIDKDAFGGVYSGPSLLLPLGRKSLSFETQKAPSSSTP

SEQ ID NO: 141 - protein, 518 aa, Artificial
  TSH alpha fusion protein
APDVQDCPECTLQENPFFSQPGAPILQCMGCCFSRAYPTPLRSKKTMLVQKNVTSESTCCVAKSYNRVTVMGGFKVENHTACHCSTCYYHKSGGGGSGGGGSGGGGSGGGGSGGGGSNATGGGGSGMGCSSPPCECHQEEDFRVTCKDIQRIPSLPPSTQTLKLIETHLRTIPSHAFSNLPNISRIYVSIDVTLQQLESHSFYNLSKVTHIEIRNTRNLTYIDPDALKELPLLKFLGIFNTGLKMFPDLTKVYSTDIFFILEITDNPYMTSIPVNAFQGLCNETLTLKLYNNGFTSVQGYAFNGTKLDAVYLNKNKYLTVIDKDAFGGVYSGPSLLDVSQTSVTALPSKGLEHLKELIARNTWTLKKLPLSLSFLHLTRADLSYPSHCCAFKNQKKIRGILESLMCNESSMQSLRQRKSVNALNSPLHQEYEENLGDSIVGYKEKSKFQDTHNNAHYYVFFEEQEDEIIGFGQELKNPQEETLQAFDSHYDYTICGDSEDMVCTPKSDEFNPCEDIMG

SEQ ID NO: 142 - protein, 521 aa, Artificial
  TSHA beta alpha fusion protein
GMGCSSPPCECHQEEDFRVTCKDIQRIPSLPPSTQTLKLIETHLRTIPSHAFSNLPNISRIYVSIDVTLQQLESHSFYNLSKVTHIEIRNTRNLTYIDPDALKELPLLKFLGIFNTGLKMFPDLTKVYSTDIFFILEITDNPYMTSIPVNAFQGLCNETLTLKLYNNGFTSVQGYAFNGTKLDAVYLNKNKYLTVIDKDAFGGVYSGPSLLDVSQTSVTALPSKGLEHLKELIARNTWTLKKLPLSLSFLHLTRADGGGGSGGGGSGGGGSNATGGGGSGGGGSGGGGSGGGGSFCIPTEYTMHIERRECAYCLTINTTICAGYCMTRDINGKLFLPKYALSQDVCTYRDFIYRTVEIPGCPLHVAPYFSYPVALSCKCGKCNTDYSDCIHEAIKTNYCTKPQKSYGGGGSGGGGSGGGGSNATGGGGSAPDVQDCPECTLQENPFFSQPGAPILQCMGCCFSRAYPTPLRSKKTMLVQKNVTSESTCCVAKSYNRVTVMGGFKVENHTACHCSTCYYHKS

SEQ ID NO: 143 - protein, 497 aa, Artificial
  TSH beta alpha fusion protein
GMGCSSPPCECHQEEDFRVTCKDIQRIPSLPPSTQTLKLIETHLRTIPSHAFSNLPNISRIYVSIDVTLQQLESHSFYNLSKVTHIEIRNTRNLTYIDPDALKELPLLKFLGIFNTGLKMFPDLTKVYSTDIFFILEITDNPYMTSIPVNAFQGLCNETLTLKLYNNGFTSVQGYAFNGTKLDAVYLNKNKYLTVIDKDAFGGVYSGPSLLLPLGRKSLSFETQKAPSSSTPGGGGSGGGGSGGGGSNATGGGGSGGGGSGGGGSGGGGSFCIPTEYTMHIERRECAYCLTINTTICAGYCMTRDINGKLFLPKYALSQDVCTYRDFIYRTVEIPGCPLHVAPYFSYPVALSCKCGKCNTDYSDCIHEAIKTNYCTKPQKSYGGGGSGGGGSGGGGSNATGGGGSAPDVQDCPECTLQENPFFSQPGAPILQCMGCCFSRAYPTPLRSKKTMLVQKNVTSESTCCVAKSYNRVTVMGGFKVENHTACHCSTCYYHKS

SEQ ID NO: 144 - protein, 663 aa, Artificial
  TSH beta alpha fusion protein
GMGCSSPPCECHQEEDFRVTCKDIQRIPSLPPSTQTLKLIETHLRTIPSHAFSNLPNISRIYVSIDVTLQQLESHSFYNLSKVTHIEIRNTRNLTYIDPDALKELPLLKFLGIFNTGLKMFPDLTKVYSTDIFFILEITDNPYMTSIPVNAFQGLCNETLTLKLYNNGFTSVQGYAFNGTKLDAVYLNKNKYLTVIDKDAFGGVYSGPSLLDVSQTSVTALPSKGLEHLKELIARNTWTLKKLPLSLSFLHLTRADLSYPSHCCAFKNQKKIRGILESLMCNESSMQSLRQRKSVNALNSPLHQEYEENLGDSIVGYKEKSKFQDTHNNAHYYVFFEEQEDEIIGFGQELKNPQEETLQAFDSHYDYTICGDSEDMVCTPKSDEFNPCEDIMGGGGGSGGGGSGGGGSGGGGSGGGGSGGGGSNATGGGGSGGGGSFCIPTEYTMHIERRECAYCLTINTTICAGYCMTRDINGKLFLPKYALSQDVCTYRDFIYRTVEIPGCPLHVAPYFSYPVALSCKCGKCNTDYSDCIHEAIKTNYCTKPQKSYGGGGSGGGGSGGGGSNATGGGGSAPDVQDCPECTLQENPFFSQPGAPILQCMGCCFSRAYPTPLRSKKTMLVQKNVTSESTCCVAKSYNRVTVMGGFKVENHTACHCSTCYYHKS

SEQ ID NO: 145 - protein, 521 aa, Artificial
  TSH alpha beta fusion protein
GMGCSSPPCECHQEEDFRVTCKDIQRIPSLPPSTQTLKLIETHLRTIPSHAFSNLPNISRIYVSIDVTLQQLESHSFYNLSKVTHIEIRNTRNLTYIDPDALKELPLLKFLGIFNTGLKMFPDLTKVYSTDIFFILEITDNPYMTSIPVNAFQGLCNETLTLKLYNNGFTSVQGYAFNGTKLDAVYLNKNKYLTVIDKDAFGGVYSGPSLLDVSQTSVTALPSKGLEHLKELIARNTWTLKKLPLSLSFLHLTRADGGGGSGGGGSGGGGSNATGGGGSGGGGSGGGGSGGGGSAPDVQDCPECTLQENPFFSQPGAPILQCMGCCFSRAYPTPLRSKKTMLVQKNVTSESTCCVAKSYNRVTVMGGFKVENHTACHCSTCYYHKSGGGGSGGGGSGGGGSNATGGGGSFCIPTEYTMHIERRECAYCLTINTTICAGYCMTRDINGKLFLPKYALSQDVCTYRDFIYRTVEIPGCPLHVAPYFSYPVALSCKCGKCNTDYSDCIHEAIKTNYCTKPQKSY

SEQ ID NO: 146 - protein, 497 aa, Artificial
  TSH alpha beta fusion protein
GMGCSSPPCECHQEEDFRVTCKDIQRIPSLPPSTQTLKLIETHLRTIPSHAFSNLPNISRIYVSIDVTLQQLESHSFYNLSKVTHIEIRNTRNLTYIDPDALKELPLLKFLGIFNTGLKMFPDLTKVYSTDIFFILEITDNPYMTSIPVNAFQGLCNETLTLKLYNNGFTSVQGYAFNGTKLDAVYLNKNKYLTVIDKDAFGGVYSGPSLLLPLGRKSLSFETQKAPSSSTPGGGGSGGGGSGGGGSNATGGGGSGGGGSGGGGSGGGGSAPDVQDCPECTLQENPFFSQPGAPILQCMGCCFSRAYPTPLRSKKTMLVQKNVTSESTCCVAKSYNRVTVMGGFKVENHTACHCSTCYYHKSGGGGSGGGGSGGGGSNATGGGGSFCIPTEYTMHIERRECAYCLTINTTICAGYCMTRDINGKLFLPKYALSQDVCTYRDFIYRTVEIPGCPLHVAPYFSYPVALSCKCGKCNTDYSDCIHEAIKTNYCTKPQKSY

SEQ ID NO: 147 - protein, 663 aa, Artificial
  TSH alpha beta fusion  protein
GMGCSSPPCECHQEEDFRVTCKDIQRIPSLPPSTQTLKLIETHLRTIPSHAFSNLPNISRIYVSIDVTLQQLESHSFYNLSKVTHIEIRNTRNLTYIDPDALKELPLLKFLGIFNTGLKMFPDLTKVYSTDIFFILEITDNPYMTSIPVNAFQGLCNETLTLKLYNNGFTSVQGYAFNGTKLDAVYLNKNKYLTVIDKDAFGGVYSGPSLLDVSQTSVTALPSKGLEHLKELIARNTWTLKKLPLSLSFLHLTRADLSYPSHCCAFKNQKKIRGILESLMCNESSMQSLRQRKSVNALNSPLHQEYEENLGDSIVGYKEKSKFQDTHNNAHYYVFFEEQEDEIIGFGQELKNPQEETLQAFDSHYDYTICGDSEDMVCTPKSDEFNPCEDIMGGGGGSGGGGSGGGGSNATGGGGSGGGGSGGGGSGGGGSGGGGSAPDVQDCPECTLQENPFFSQPGAPILQCMGCCFSRAYPTPLRSKKTMLVQKNVTSESTCCVAKSYNRVTVMGGFKVENHTACHCSTCYYHKSGGGGSGGGGSGGGGSNATGGGGSFCIPTEYTMHIERRECAYCLTINTTICAGYCMTRDINGKLFLPKYALSQDVCTYRDFIYRTVEIPGCPLHVAPYFSYPVALSCKCGKCNTDYSDCIHEAIKTNYCTKPQKSY

SEQ ID NO: 148 - protein, 406 aa, Artificial
  TSH beta fusion protein
GMGCSSPPCECHQEEDFRVTCKDIQRIPSLPPSTQTLKLIETHLRTIPSHAFSNLPNISRIYVSIDVTLQQLESHSFYNLSKVTHIEIRNTRNLTYIDPDALKELPLLKFLGIFNTGLKMFPDLTKVYSTDIFFILEITDNPYMTSIPVNAFQGLCNETLTLKLYNNGFTSVQGYAFNGTKLDAVYLNKNKYLTVIDKDAFGGVYSGPSLLDVSQTSVTALPSKGLEHLKELIARNTWTLKKLPLSLSFLHLTRADGGGGSGGGGSGGGGSNATGGGGSGGGGSGGGGSGGGGSFCIPTEYTMHIERRECAYCLTINTTICAGYCMTRDINGKLFLPKYALSQDVCTYRDFIYRTVEIPGCPLHVAPYFSYPVALSCKCGKCNTDYSDCIHEAIKTNYCTKPQKSY

SEQ ID NO: 149 - protein, 406 aa, Artificial; identical to SEQ ID NO: 148
  TSH beta fusion protein

SEQ ID NO: 150 - protein, 548 aa, Artificial
  TSH beta fusion protein
GMGCSSPPCECHQEEDFRVTCKDIQRIPSLPPSTQTLKLIETHLRTIPSHAFSNLPNISRIYVSIDVTLQQLESHSFYNLSKVTHIEIRNTRNLTYIDPDALKELPLLKFLGIFNTGLKMFPDLTKVYSTDIFFILEITDNPYMTSIPVNAFQGLCNETLTLKLYNNGFTSVQGYAFNGTKLDAVYLNKNKYLTVIDKDAFGGVYSGPSLLDVSQTSVTALPSKGLEHLKELIARNTWTLKKLPLSLSFLHLTRADLSYPSHCCAFKNQKKIRGILESLMCNESSMQSLRQRKSVNALNSPLHQEYEENLGDSIVGYKEKSKFQDTHNNAHYYVFFEEQEDEIIGFGQELKNPQEETLQAFDSHYDYTICGDSEDMVCTPKSDEFNPCEDIMGGGGGSGGGGSGGGGSNATGGGGSGGGGSGGGGSGGGGSGGGGSFCIPTEYTMHIERRECAYCLTINTTICAGYCMTRDINGKLFLPKYALSQDVCTYRDFIYRTVEIPGCPLHVAPYFSYPVALSCKCGKCNTDYSDCIHEAIKTNYCTKPQKSY

SEQ ID NO: 151 - protein, 386 aa, Artificial
  TSH alpha fusion protein
GMGCSSPPCECHQEEDFRVTCKDIQRIPSLPPSTQTLKLIETHLRTIPSHAFSNLPNISRIYVSIDVTLQQLESHSFYNLSKVTHIEIRNTRNLTYIDPDALKELPLLKFLGIFNTGLKMFPDLTKVYSTDIFFILEITDNPYMTSIPVNAFQGLCNETLTLKLYNNGFTSVQGYAFNGTKLDAVYLNKNKYLTVIDKDAFGGVYSGPSLLDVSQTSVTALPSKGLEHLKELIARNTWTLKKLPLSLSFLHLTRADGGGGSGGGGSGGGGSNATGGGGSGGGGSGGGGSGGGGSAPDVQDCPECTLQENPFFSQPGAPILQCMGCCFSRAYPTPLRSKKTMLVQKNVTSESTCCVAKSYNRVTVMGGFKVENHTACHCSTCYYHKS

SEQ ID NO: 152 - protein, 362 aa, Artificial
  TSH alpha fusion protein
GMGCSSPPCECHQEEDFRVTCKDIQRIPSLPPSTQTLKLIETHLRTIPSHAFSNLPNISRIYVSIDVTLQQLESHSFYNLSKVTHIEIRNTRNLTYIDPDALKELPLLKFLGIFNTGLKMFPDLTKVYSTDIFFILEITDNPYMTSIPVNAFQGLCNETLTLKLYNNGFTSVQGYAFNGTKLDAVYLNKNKYLTVIDKDAFGGVYSGPSLLLPLGRKSLSFETQKAPSSSTPGGGGSGGGGSGGGGSNATGGGGSGGGGSGGGGSGGGGSAPDVQDCPECTLQENPFFSQPGAPILQCMGCCFSRAYPTPLRSKKTMLVQKNVTSESTCCVAKSYNRVTVMGGFKVENHTACHCSTCYYHKS

SEQ ID NO: 153 - protein, 523 aa, Artificial
  TSH alpha fusion protein
GMGCSSPPCECHQEEDFRVTCKDIQRIPSLPPSTQTLKLIETHLRTIPSHAFSNLPNISRIYVSIDVTLQQLESHSFYNLSKVTHIEIRNTRNLTYIDPDALKELPLLKFLGIFNTGLKMFPDLTKVYSTDIFFILEITDNPYMTSIPVNAFQGLCNETLTLKLYNNGFTSVQGYAFNGTKLDAVYLNKNKYLTVIDKDAFGGVYSGPSLLDVSQTSVTALPSKGLEHLKELIARNTWTLKKLPLSLSFLHLTRADLSYPSHCCAFKNQKKIRGILESLMCNESSMQSLRQRKSVNALNSPLHQEYEENLGDSIVGYKEKSKFQDTHNNAHYYVFFEEQEDEIIGFGQELKNPQEETLQAFDSHYDYTICGDSEDMVCTPKSDEFNPCEDIMGGGGGSGGGGSGGGGSNATGGGGSGGGGSGGGGSGGGGSAPDVQDCPECTLQENPFFSQPGAPILQCMGCCFSRAYPTPLRSKKTMLVQKNVTSESTCCVAKSYNRVTVMGGFKVENHTACHCSTCYYHKS

SEQ ID NO: 154 - protein, 531 aa, Artificial
  TSH alpha beta receptor fusion potein
APDVQDCPECTLQENPFFSQPGAPILQCMGCCFSRAYPTPLRSKKTMLVQKNVTSESTCCVAKSYNRVTVMGGFKVENHTACHCSTCYYHKSGGGGSGGGGSGGGGSGGGGSNATGGGGSGGGGSGMGCSSPPCECHQEEDFRVTCKDIQRIPSLPPSTQTLKLIETHLRTIPSHAFSNLPNISRIYVSIDVTLQQLESHSFYNLSKVTHIEIRNTRNLTYIDPDALKELPLLKFLGIFNTGLKMFPDLTKVYSTDIFFILEITDNPYMTSIPVNAFQGLCNETLTLKLYNNGFTSVQGYAFNGTKLDAVYLNKNKYLTVIDKDAFGGVYSGPSLLDVSQTSVTALPSKGLEHLKELIARNTWTLKKLPLSLSFLHLTRADGGGGSGGGGSGGGGSNATGGGGSGGGGSGGGGSGGGGSFCIPTEYTMHIERRECAYCLTINTTICAGYCMTRDINGKLFLPKYALSQDVCTYRDFIYRTVEIPGCPLHVAPYFSYPVALSCKCGKCNTDYSDCIHEAIKTNYCTKPQKSY

SEQ ID NO: 155 - protein, 507 aa, Artificial
  TSH alpha beta fusion protein
APDVQDCPECTLQENPFFSQPGAPILQCMGCCFSRAYPTPLRSKKTMLVQKNVTSESTCCVAKSYNRVTVMGGFKVENHTACHCSTCYYHKSGGGGSGGGGSGGGGSGGGGSNATGGGGSGGGGSGMGCSSPPCECHQEEDFRVTCKDIQRIPSLPPSTQTLKLIETHLRTIPSHAFSNLPNISRIYVSIDVTLQQLESHSFYNLSKVTHIEIRNTRNLTYIDPDALKELPLLKFLGIFNTGLKMFPDLTKVYSTDIFFILEITDNPYMTSIPVNAFQGLCNETLTLKLYNNGFTSVQGYAFNGTKLDAVYLNKNKYLTVIDKDAFGGVYSGPSLLLPLGRKSLSFETQKAPSSSTPGGGGSGGGGSGGGGSNATGGGGSGGGGSGGGGSGGGGSFCIPTEYTMHIERRECAYCLTINTTICAGYCMTRDINGKLFLPKYALSQDVCTYRDFIYRTVEIPGCPLHVAPYFSYPVALSCKCGKCNTDYSDCIHEAIKTNYCTKPQKSY

SEQ ID NO: 156 - protein, 673 aa, Artificial
  TSH alpha beta fusion protein
APDVQDCPECTLQENPFFSQPGAPILQCMGCCFSRAYPTPLRSKKTMLVQKNVTSESTCCVAKSYNRVTVMGGFKVENHTACHCSTCYYHKSGGGGSGGGGSGGGGSGGGGSNATGGGGSGGGGSGMGCSSPPCECHQEEDFRVTCKDIQRIPSLPPSTQTLKLIETHLRTIPSHAFSNLPNISRIYVSIDVTLQQLESHSFYNLSKVTHIEIRNTRNLTYIDPDALKELPLLKFLGIFNTGLKMFPDLTKVYSTDIFFILEITDNPYMTSIPVNAFQGLCNETLTLKLYNNGFTSVQGYAFNGTKLDAVYLNKNKYLTVIDKDAFGGVYSGPSLLDVSQTSVTALPSKGLEHLKELIARNTWTLKKLPLSLSFLHLTRADLSYPSHCCAFKNQKKIRGILESLMCNESSMQSLRQRKSVNALNSPLHQEYEENLGDSIVGYKEKSKFQDTHNNAHYYVFFEEQEDEIIGFGQELKNPQEETLQAFDSHYDYTICGDSEDMVCTPKSDEFNPCEDIMGGGGGSGGGGSGGGGSNATGGGGSGGGGSGGGGSGGGGSGGGGSFCIPTEYTMHIERRECAYCLTINTTICAGYCMTRDINGKLFLPKYALSQDVCTYRDFIYRTVEIPGCPLHVAPYFSYPVALSCKCGKCNTDYSDCIHEAIKTNYCTKPQKSY

SEQ ID NO: 157 - protein, 536 aa, Artificial
  TSH beta alpha fusion protein
FCIPTEYTMHIERRECAYCLTINTTICAGYCMTRDINGKLFLPKYALSQDVCTYRDFIYRTVEIPGCPLHVAPYFSYPVALSCKCGKCNTDYSDCIHEAIKTNYCTKPQKSYGGGGSGGGGSGGGGSGGGGSGGGGSNATGGGGSGGGGSGMGCSSPPCECHQEEDFRVTCKDIQRIPSLPPSTQTLKLIETHLRTIPSHAFSNLPNISRIYVSIDVTLQQLESHSFYNLSKVTHIEIRNTRNLTYIDPDALKELPLLKFLGIFNTGLKMFPDLTKVYSTDIFFILEITDNPYMTSIPVNAFQGLCNETLTLKLYNNGFTSVQGYAFNGTKLDAVYLNKNKYLTVIDKDAFGGVYSGPSLLDVSQTSVTALPSKGLEHLKELIARNTWTLKKLPLSLSFLHLTRADGGGGSGGGGSGGGGSNATGGGGSGGGGSGGGGSGGGGSAPDVQDCPECTLQENPFFSQPGAPILQCMGCCFSRAYPTPLRSKKTMLVQKNVTSESTCCVAKSYNRVTVMGGFKVENHTACHCSTCYYHKS

SEQ ID NO: 158 - protein, 512 aa, Artificial
  TSH beta alpha fusion protein
FCIPTEYTMHIERRECAYCLTINTTICAGYCMTRDINGKLFLPKYALSQDVCTYRDFIYRTVEIPGCPLHVAPYFSYPVALSCKCGKCNTDYSDCIHEAIKTNYCTKPQKSYGGGGSGGGGSGGGGSGGGGSGGGGSNATGGGGSGGGGSGMGCSSPPCECHQEEDFRVTCKDIQRIPSLPPSTQTLKLIETHLRTIPSHAFSNLPNISRIYVSIDVTLQQLESHSFYNLSKVTHIEIRNTRNLTYIDPDALKELPLLKFLGIFNTGLKMFPDLTKVYSTDIFFILEITDNPYMTSIPVNAFQGLCNETLTLKLYNNGFTSVQGYAFNGTKLDAVYLNKNKYLTVIDKDAFGGVYSGPSLLLPLGRKSLSFETQKAPSSSTPGGGGSGGGGSGGGGSNATGGGGSGGGGSGGGGSGGGGSAPDVQDCPECTLQENPFFSQPGAPILQCMGCCFSRAYPTPLRSKKTMLVQKNVTSESTCCVAKSYNRVTVMGGFKVENHTACHCSTCYYHKS

SEQ ID NO: 159 - protein, 678 aa, Artificial
  TSH beta alpha fusion protein
FCIPTEYTMHIERRECAYCLTINTTICAGYCMTRDINGKLFLPKYALSQDVCTYRDFIYRTVEIPGCPLHVAPYFSYPVALSCKCGKCNTDYSDCIHEAIKTNYCTKPQKSYGGGGSGGGGSGGGGSGGGGSGGGGSNATGGGGSGGGGSGMGCSSPPCECHQEEDFRVTCKDIQRIPSLPPSTQTLKLIETHLRTIPSHAFSNLPNISRIYVSIDVTLQQLESHSFYNLSKVTHIEIRNTRNLTYIDPDALKELPLLKFLGIFNTGLKMFPDLTKVYSTDIFFILEITDNPYMTSIPVNAFQGLCNETLTLKLYNNGFTSVQGYAFNGTKLDAVYLNKNKYLTVIDKDAFGGVYSGPSLLDVSQTSVTALPSKGLEHLKELIARNTWTLKKLPLSLSFLHLTRADLSYPSHCCAFKNQKKIRGILESLMCNESSMQSLRQRKSVNALNSPLHQEYEENLGDSIVGYKEKSKFQDTHNNAHYYVFFEEQEDEIIGFGQELKNPQEETLQAFDSHYDYTICGDSEDMVCTPKSDEFNPCEDIMGGGGGSGGGGSGGGGSNATGGGGSGGGGSGGGGSGGGGSGGGGSAPDVQDCPECTLQENPFFSQPGAPILQCMGCCFSRAYPTPLRSKKTMLVQKNVTSESTCCVAKSYNRVTVMGGFKVENHTACHCSTCYYHKS

SEQ ID NO: 160 - protein, 483 aa, Artificial
  beta alpha tandem fusion protein
FCIPTEYTMHIERRECAYCLTINTTICAGYCMTRDINGKLFLPKYALSQDVCTYRDFIYRTVEIPGCPLHVAPYFSYPVALSCKCGKCNTDYSDCIHEAIKTNYCTKPQKSYGGGGSGGGGSGGGGSGGGGSAPDVQDCPECTLQENPFFSQPGAPILQCMGCCFSRAYPTPLRSKKTMLVQKNVTSESTCCVAKSYNRVTVMGGFKVENHTACHCSTCYYHKSGGGGSGGGGSGGGGSGGGGSGGGGSGGGGSGGGGSFCIPTEYTMHIERRECAYCLTINTTICAGYCMTRDINGKLFLPKYALSQDVCTYRDFIYRTVEIPGCPLHVAPYFSYPVALSCKCGKCNTDYSDCIHEAIKTNYCTKPQKSYGGGGSGGGGSGGGGSGGGGSAPDVQDCPECTLQENPFFSQPGAPILQCMGCCFSRAYPTPLRSKKTMLVQKNVTSESTCCVAKSYNRVTVMGGFKVENHTACHCSTCYYHKS

SEQ ID NO: 161 - protein, 483 aa, Artificial
  alpha beta tandem fusion protein
APDVQDCPECTLQENPFFSQPGAPILQCMGCCFSRAYPTPLRSKKTMLVQKNVTSESTCCVAKSYNRVTVMGGFKVENHTACHCSTCYYHKSGGGGSGGGGSGGGGSGGGGSFCIPTEYTMHIERRECAYCLTINTTICAGYCMTRDINGKLFLPKYALSQDVCTYRDFIYRTVEIPGCPLHVAPYFSYPVALSCKCGKCNTDYSDCIHEAIKTNYCTKPQKSYGGGGSGGGGSGGGGSGGGGSGGGGSGGGGSGGGGSFCIPTEYTMHIERRECAYCLTINTTICAGYCMTRDINGKLFLPKYALSQDVCTYRDFIYRTVEIPGCPLHVAPYFSYPVALSCKCGKCNTDYSDCIHEAIKTNYCTKPQKSYGGGGSGGGGSGGGGSGGGGSAPDVQDCPECTLQENPFFSQPGAPILQCMGCCFSRAYPTPLRSKKTMLVQKNVTSESTCCVAKSYNRVTVMGGFKVENHTACHCSTCYYHKS

SEQ ID NO: 162 - protein, 483 aa, Artificial
  beta alpha tandem fusion protein
FCIPTEYTMHIERRECAYCLTINTTICAGYCMTRDINGKLFLPKYALSQDVCTYRDFIYRTVEIPGCPLHVAPYFSYPVALSCKCGKCNTDYSDCIHEAIKTNYCTKPQKSYGGGGSGGGGSGGGGSGGGGSAPDVQDCPECTLQENPFFSQPGAPILQCMGCCFSRAYPTPLRSKKTMLVQKNVTSESTCCVAKSYNRVTVMGGFKVENHTACHCSTCYYHKSGGGGSGGGGSGGGGSGGGGSGGGGSGGGGSGGGGSAPDVQDCPECTLQENPFFSQPGAPILQCMGCCFSRAYPTPLRSKKTMLVQKNVTSESTCCVAKSYNRVTVMGGFKVENHTACHCSTCYYHKSGGGGSGGGGSGGGGSGGGGSFCIPTEYTMHIERRECAYCLTINTTICAGYCMTRDINGKLFLPKYALSQDVCTYRDFIYRTVEIPGCPLHVAPYFSYPVALSCKCGKCNTDYSDCIHEAIKTNYCTKPQKSY

SEQ ID NO: 163 - protein, 483 aa, Artificial
  alpha beta tandem fusion protein
APDVQDCPECTLQENPFFSQPGAPILQCMGCCFSRAYPTPLRSKKTMLVQKNVTSESTCCVAKSYNRVTVMGGFKVENHTACHCSTCYYHKSGGGGSGGGGSGGGGSGGGGSFCIPTEYTMHIERRECAYCLTINTTICAGYCMTRDINGKLFLPKYALSQDVCTYRDFIYRTVEIPGCPLHVAPYFSYPVALSCKCGKCNTDYSDCIHEAIKTNYCTKPQKSYGGGGSGGGGSGGGGSGGGGSGGGGSGGGGSGGGGSAPDVQDCPECTLQENPFFSQPGAPILQCMGCCFSRAYPTPLRSKKTMLVQKNVTSESTCCVAKSYNRVTVMGGFKVENHTACHCSTCYYHKSGGGGSGGGGSGGGGSGGGGSFCIPTEYTMHIERRECAYCLTINTTICAGYCMTRDINGKLFLPKYALSQDVCTYRDFIYRTVEIPGCPLHVAPYFSYPVALSCKCGKCNTDYSDCIHEAIKTNYCTKPQKSY

SEQ ID NO: 164 - protein, 224 aa, Artificial
  TSH alpha beta fusion protein
FCIPTEYTMHIERRECAYCLTINTTICAGYCMTRDINGKLFLPKYALSQDVCTYRDFIYRTVEIPGCPLHVAPYFSYPVALSCKCGKCNTDYSDCIHEAIKTNYCTKPQKSYGGGGSGGGGSGGNGSGGGGSAPDVQDCPECTLQENPFFSQPGAPILQCMGCCFSRAYPTPLRSKKTMLVQKNVTSESTCCVAKSYNRVTVMGGFKVENHTACHCSTCYYHKS

SEQ ID NO: 165 - protein, 224 aa, Artificial
  TSH alpha beta fusion protein
APDVQDCPECTLQENPFFSQPGAPILQCMGCCFSRAYPTPLRSKKTMLVQKNVTSESTCCVAKSYNRVTVMGGFKVENHTACHCSTCYYHKSGGGGSGGGGSGGNGSGGGGSFCIPTEYTMHIERRECAYCLTINTTICAGYCMTRDINGKLFLPKYALSQDVCTYRDFIYRTVEIPGCPLHVAPYFSYPVALSCKCGKCNTDYSDCIHEAIKTNYCTKPQKSY

SEQ ID NO: 166 - protein, 224 aa, Artificial
  TSH beta alpha fusion protein
FCIPTEYTMHIERRECAYCLTINTTICAGYCMTRDINGKLFLPKYALSQDVCTYRDFIYRTVEIPGCPLHVAPYFSYPVALSCKCGKCNTDYSDCIHEAIKTNYCTKPQKSYGGGGSGGGGSGGNGTGGGGSAPDVQDCPECTLQENPFFSQPGAPILQCMGCCFSRAYPTPLRSKKTMLVQKNVTSESTCCVAKSYNRVTVMGGFKVENHTACHCSTCYYHKS

SEQ ID NO: 167 - protein, 224 aa, Artificial
  TSH alpha beta fusion protein
APDVQDCPECTLQENPFFSQPGAPILQCMGCCFSRAYPTPLRSKKTMLVQKNVTSESTCCVAKSYNRVTVMGGFKVENHTACHCSTCYYHKSGGGGSGGGGSGGNGTGGGGSFCIPTEYTMHIERRECAYCLTINTTICAGYCMTRDINGKLFLPKYALSQDVCTYRDFIYRTVEIPGCPLHVAPYFSYPVALSCKCGKCNTDYSDCIHEAIKTNYCTKPQKSY

SEQ ID NO: 168 - protein, 224 aa, Artificial
  TSH beta alpha fusion protein
FCIPTEYTMHIERRECAYCLTINTTICAGYCMTRDINGKLFLPKYALSQDVCTYRDFIYRTVEIPGCPLHVAPYFSYPVALSCKCGKCNTDYSDCIHEAIKTNYCTKPQKSYGGGGSGGGGSGWNGSGGGGSAPDVQDCPECTLQENPFFSQPGAPILQCMGCCFSRAYPTPLRSKKTMLVQKNVTSESTCCVAKSYNRVTVMGGFKVENHTACHCSTCYYHKS

SEQ ID NO: 169 - protein, 224 aa, Artificial
  TSH alpha beta fusion protein
APDVQDCPECTLQENPFFSQPGAPILQCMGCCFSRAYPTPLRSKKTMLVQKNVTSESTCCVAKSYNRVTVMGGFKVENHTACHCSTCYYHKSGGGGSGGGGSGWNGSGGGGSFCIPTEYTMHIERRECAYCLTINTTICAGYCMTRDINGKLFLPKYALSQDVCTYRDFIYRTVEIPGCPLHVAPYFSYPVALSCKCGKCNTDYSDCIHEAIKTNYCTKPQKSY

SEQ ID NO: 170 - protein, 227 aa, Artificial
  TSH beta alpha fusion protein
FCIPTEYTMHIERRECAYCLTINTTICAGYCMTRDINGKLFLPKYALSQDVCTYRDFIYRTVEIPGCPLHVAPYFSYPVALSCKCGKCNTDYSDCIHEAIKTNYCTKPQKSYGGGGSGGGGSGGGGSNATGGGGSAPDVQDCPECTLQENPFFSQPGAPILQCMGCCFSRAYPTPLRSKKTMLVQKNVTSESTCCVAKSYNRVTVMGGFKVENHTACHCSTCYYHKS

SEQ ID NO: 171 - protein, 227 aa, Artificial
  TSH alpha beta fusion protein
APDVQDCPECTLQENPFFSQPGAPILQCMGCCFSRAYPTPLRSKKTMLVQKNVTSESTCCVAKSYNRVTVMGGFKVENHTACHCSTCYYHKSGGGGSGGGGSGGGGSNATGGGGSFCIPTEYTMHIERRECAYCLTINTTICAGYCMTRDINGKLFLPKYALSQDVCTYRDFIYRTVEIPGCPLHVAPYFSYPVALSCKCGKCNTDYSDCIHEAIKTNYCTKPQKSY

SEQ ID NO: 172 - protein, 5 aa, Artificial
  glycine rich linker
GGGGS

SEQ ID NO: 173 - protein, 7 aa, Artificial
  rigid helical peptide linker
AEAAAKA

SEQ ID NO: 174 - protein, 5 aa, Artificial
  glycosylation motif
  misc_feature: wherein said motif comprises the glycosylation motif Asn-Xaa-Ser or Asn-Xaa-Thr.
  misc_feature (1)..(5): Xaa can be any naturally occurring amino acid
XXXXX

SEQ ID NO: 175 - protein, 5 aa, Artificial
  glycosylation motif
  misc_feature: wherein X is any amino acid except proline
  misc_feature (2)..(2): Xaa can be any naturally occurring amino acid
  misc_feature (4)..(5): Xaa can be any naturally occurring amino acid
NXSXX

SEQ ID NO: 176 - protein, 5 aa, Artificial
  glycosylation motif
  misc_feature: wherein X is any amino acid except proline
  misc_feature (1)..(1): Xaa can be any naturally occurring amino acid
  misc_feature (3)..(3): Xaa can be any naturally occurring amino acid
  misc_feature (5)..(5): Xaa can be any naturally occurring amino acid
XNXSX

SEQ ID NO: 177 - protein, 5 aa, Artificial
  glycosylation motif
  misc_feature: wherein X is any amino acid except proline
  misc_feature (1)..(2): Xaa can be any naturally occurring amino acid
  misc_feature (4)..(4): Xaa can be any naturally occurring amino acid
XXNXS

SEQ ID NO: 178 - protein, 5 aa, Artificial
  glycosylation motif
  misc_feature: wherein X is any amino acid except proline
  misc_feature (2)..(2): Xaa can be any naturally occurring amino acid
  misc_feature (4)..(5): Xaa can be any naturally occurring amino acid
NXTXX

SEQ ID NO: 179 - protein, 5 aa, Artificial
  glycosylation motif
  misc_feature: wherein X is any amino acid except proline
  misc_feature (1)..(1): Xaa can be any naturally occurring amino acid
  misc_feature (3)..(3): Xaa can be any naturally occurring amino acid
  misc_feature (5)..(5): Xaa can be any naturally occurring amino acid
XNXTX

SEQ ID NO: 180 - protein, 5 aa, Artificial
  glycosylation motif
  misc_feature: wherein X is any amino acid except proline
  misc_feature (1)..(2): Xaa can be any naturally occurring amino acid
  misc_feature (4)..(4): Xaa can be any naturally occurring amino acid
XXNXT

SEQ ID NO: 181 - protein, 5 aa, Artificial
  glycosylation motif
  misc_feature: wherein X is any amino acid except proline
  misc_feature (2)..(2): Xaa can be any naturally occurring amino acid
NXSGS

SEQ ID NO: 182 - protein, 5 aa, Artificial
  glycosylation motif
  misc_feature: wherein X is any amino acid except proline
  misc_feature (3)..(3): Xaa can be any naturally occurring amino acid
GNXSS

SEQ ID NO: 183 - protein, 5 aa, Artificial
  glycosylation motif
  misc_feature: wherein X is any amino acid except proline
  misc_feature (4)..(4): Xaa can be any naturally occurring amino acid
GGNXS

SEQ ID NO: 184 - protein, 5 aa, Artificial
  glycosylation motif
  misc_feature: wherein X is any amino acid except proline
  misc_feature (2)..(2): Xaa can be any naturally occurring amino acid
NXTGS

SEQ ID NO: 185 - protein, 5 aa, Artificial
  glycosylation motif
  misc_feature: wherein X is any amino acid except proline
  misc_feature (3)..(3): Xaa can be any naturally occurring amino acid
GNXTS

SEQ ID NO: 186 - protein, 5 aa, Artificial
  glycosylation motif
  misc_feature: wherein X is any amino acid except proline
  misc_feature (4)..(4): Xaa can be any naturally occurring amino acid
GGNXT

SEQ ID NO: 187 - protein, 5 aa, Artificial
  glycosylation motif
  misc_feature: wherein X is any amino acid except proline
  misc_feature (2)..(2): Xaa can be any naturally occurring amino acid
NXSSG

SEQ ID NO: 188 - protein, 5 aa, Artificial
  glycosylation motif
  misc_feature: wherein X is any amino acid except proline
  misc_feature (3)..(3): Xaa can be any naturally occurring amino acid
SNXSG

SEQ ID NO: 189 - protein, 5 aa, Artificial
  glycosylation motif
  misc_feature: wherein X is any amino acid except proline
  misc_feature (4)..(4): Xaa can be any naturally occurring amino acid
SSNXS

SEQ ID NO: 190 - protein, 5 aa, Artificial
  glycosylation motif
  misc_feature: wherein X is any amino acid except proline
  misc_feature (2)..(2): Xaa can be any naturally occurring amino acid
NXTSG

SEQ ID NO: 191 - protein, 5 aa, Artificial
  glycosylation motif
  misc_feature: wherein X is any amino acid except proline
  misc_feature (3)..(3): Xaa can be any naturally occurring amino acid
SNXTG

SEQ ID NO: 192 - protein, 5 aa, Artificial
  glycosylation motif
  misc_feature (4)..(4): Xaa can be any naturally occurring amino acid
SSNXT
